(19) United States
(12) Patent Application Publication
(10) Pub. No.: US 2021/0246463 A1
(43) Pub. Date: Aug. 12, 2021

(54) BALANCED RESISTANCE AND AVIRULENCE GENE EXPRESSION

(71) Applicant: KWS SAAT SE & Co. KGaA, Einbeck (DE)

(72) Inventors: Dietmar Stahl, Einbeck (DE); Gabor Miklos Gyetvai, Goettingen (DE); Daniel Fabian Stirnweis, Goettingen (DE)

(21) Appl. No.: 17/253,224

(22) PCT Filed: Jun. 18, 2019
(86) PCT No.: PCT/EP2019/066096

§ 371 Date: Dec. 17, 2020

(30) Foreign Application Priority Data
Jun. 18, 2018 (EP) 18178359.8

(51) Int. Cl. C12N 15/82; C07K 14/415

(52) U.S. Cl. CPC C12N 15/8282; C12N 15/8261; C07K 14/415

(57) ABSTRACT

The invention is related to nucleic acids encoding resistance proteins, avirulence proteins, or both, wherein at least one of the proteins include at least one amino acid substitution in comparison to the wild type amino acid sequence of the resistance and/or avirulence protein, said substitution leading to a decrease of cell death during a hypersensitive reaction. Furthermore, the invention does also encompass an expression cassette, a vector, a cell, a plant, plant tissue or plant seed comprising on of the nucleic acids or one of the proteins. Finally, the invention provides a method for increasing a plant's resistance towards at least one plant pathogen.

### FIELD OF THE INVENTION

[0001] The present invention relates to a nucleic acid for increasing the resistance of a plant or a part thereof towards at least one pathogen, as well as to methods using the nucleic acid.

### BACKGROUND OF THE INVENTION

[0002] Plants possess a highly efficient, two layered innate immune system that makes them resistant against most microbial pathogens (Jones and Dangl, 2006).

[0003] The first layer of defense relies on the recognition of evolutionary conserved pathogen- or microbial-associated molecular patterns (PAMPS or MAMPs) by pattern among microbial taxa and have essential roles in microbial physiology. Only an extremely recognition receptors (PRRs). PAMPs or MAMPs are invariant structures broadly represented select group of molecules have been found to function as PAMPs (Gaudet and Gray-Owen, 2016). PRRs are generally plasma membrane receptors, which are often coupled to intracellular kinase domains or require a co-receptor to provide signaling function (Dangl et al., 2013). Depending on the presence of the signal transduction domain, the plant PRRs are classified either as receptor-like kinases (RLKs) or as receptor-like proteins (RLPs), as described by Macho and Zipfel (2014). Recognition of pathogen-associated molecular patterns (PAMPs) in the apoplast by pattern recognition receptors (PRRs) initiates a complex signaling cascade leading to PRR-triggered immunity (PTI). Adapted pathogens are able to suppress the first defense layer through the secretion of effector proteins that interfere with the signaling (Jones and Dangl, 2006, Cesari et al., 2014).

[0004] The second layer of plant defense, the effector triggered immunity (ETI), relies on the specific recognition of effectors by disease resistance genes (Jones and Dangl, 2006). This recognition leads to a strong defense response which is often associated with a local programmed cell death, the hypersensitive reaction. Since effectors are generally species- or isolate-specific, this second layer of immunity is only efficient against isolates that carry the recognized effector, which is then called an avirulence gene (Césari et al., 2014). Naturally occurring avirulence gene comprise a signaling sequence allowing for the intracellular processing within the pathogen.

[0005] The co-expression of a resistance gene and the corresponding avirulence gene in a plant cell is a promising concept to design genetically modified plants with a broad fungal resistance. The activation of resistance gene dependent defense reactions is frequently associated with cell death, the hallmark of innate immunity.

[0006] Plant resistance proteins (R-proteins) are classified into five main classes (FIG. 1), based on their structure and localization (Dangl and Jones 2001). Most resistance proteins belong to the nucleotide-binding-site leucine-rich repeat (NBS-LRR) family and are localized intracellularly. LRR domains are found in diverse proteins and function as sites of protein-protein interaction and protein-ligand binding. The recognition specificity of an NBS-LRR R-protein is usually determined by the C-terminal LRR domain. The conserved nucleotide-binding-site (NBS) domain is part of the larger NBS-ARC domain, which functions as a molecular switch which is involved in the Avr-dependent conformation change of the R-protein (Takken et al., 2006).

[0007] Depending on the N-terminal domain, NBS-LRR resistance proteins can be subdivided into CC-NBS-LRR and TIR-NBS-LRR proteins. CC-NBS-LRR proteins carry a coiled-coil (CC) domain at their N-terminus, and TIR-NBS-LRR proteins possess an N-terminus with homology to the TOLL/interleukin 1 receptor (TIR), as reviewed by Dangl and Jones, 2001. TIR-NBS-LRR proteins are completely absent from cereal species (McHale et al., 2006). The N-terminal domains are involved in downstream signaling.

[0008] The CC-domain of CC-NBS-LRR resistance proteins are classified into 2 groups according Collier and Moffet (2009) and Collier et al. (2011). The majority of CC-domains possesses a small “EDVID” consensus motif and was termed the CC_{EDVID} subtype. The EDVID motif or variations are required for the Avr dependent induction of a hypersensitive reaction as shown by amino acid substitution of the Rx protein (Rairdan et al. 2008).

[0009] The EDVID motif is absent in the CC_{RPW8} or CC_{R} domain, a less abundant subclass of CC domain. Few CC_{R}-NB-LRR proteins have been cloned to date. The best-studied members of this group include N-required gene 1 (NRG1) of Nicotiana benthamiana and activated disease resistance gene 1 (ADR1) of Arabidopsis thaliana (Collier et al., 2011). It was assumed that overexpression of an isolated CC_{EDVID} domain is not sufficient for inducing defense responses, unlike the CC_{R} domain of NRG1 or certain TIR domains (Collier et al., 2011). However, a subclass of the CC_{EDVID} domain is sufficient for cell-death induction (WO/2006/128444). This subclass is termed CC_{DAE} or CC_{DAE+EDVID} subtype, based on the presence of a typical conserved DAE motif in addition to the EDVID motif. Following this classification, the CC-NBS-LRR proteins can be divided into 3 subclasses (FIG. 1).

[0010] The functionality of a single R-gene is usually restricted to a plant family or even to a species. This phenomenon is named “restricted taxonomic functionality”. Heterologous expression of NB-LRR type R genes in a taxonomically distinct family triggers either no response or inappropriate immunity, suggesting that the regulatory or signaling components associated with NB-LRR protein based resistance are family-specific (Brutus et al., 2010). Resistance gene transfer between species may be limited not only by divergence of signaling effector molecules and pathogen avirulence ligands, but potentially also by more fundamental gene expression and transcript processing limitations (Ayliffe et al., 2004).

[0011] A break of the restricted taxonomic functionality was reported by the transfer of a pair of NB-LRR-type R-genes, RPS4 and RRS1 (Narusaka et al., 2013) from a Brassicaceae plant (Arabidopsis thaliana) into two Solanaceae plants (Nicotiana benthamiana, Solanum lycopersicum). An interfamily transfer from a Solanaceae plant (Solanum lycopersicum) to a Brassicaceae plant (Arabidopsis thaliana) was described for the RLP-type R-protein Ve1 (Fradin et al., 2011). However, although Ve1 is considered to encode a race-specific resistance protein, several observations support the hypothesis that Ve1 is an ancient pathogen receptor with traits of typical PRRs (Fradin et al., 2011). It is known that pattern recognition receptors (PRRs) can be transferred across species boundaries, as exemplified by the transfer of the PRRs EF-Tu and FLS2 from A. thaliana to N. benthamiana and S. lycopersicum. Until now, only alleles of certain single NB-LRR R-genes, as well as one two-component NB-LRR resistance gene pair were found to be suitable for an interfamily transfer from the family of Poaceae or Gramineae into the plant families of Solanaceae and Brassicaceae. The barley powdery mildew resistance gene Mla1 triggers cell death in A. thaliana after co-expression with the corresponding avirulence gene AVRₐ₁ (Lu et al., 2016). Its wheat orthologs Sr33 and Sr50 trigger cell death when overexpressed in N. benthamiana leaves (Cesari et al., 2016). The wheat powdery mildew resistance genes Pm3a and Pm3f trigger cell death after co-expression with the corresponding avirulence gene AvrPm3^{a2/f2} in N. benthamiana (Bourras et al., 2015). The avirulence gene AvrPia of Magnaporthe grisea was recognized in N. benthamiana by co-expression with the two-component NB-LRR resistance gene pair Pia_Rga4/Rga5 from rice. Generally, the distant relationship between monocot plants and dicot plants makes it difficult to predict whether a resistance gene originating from the one group is able to trigger an immune response in the other group.

[0012] The NBS-LRR resistance gene R3a of potato was cloned by a comparative genomics approach using synteny between the complex R3a locus of potato and the 12 complex locus of tomato (Huang et al., 2005). To date, R3a function was only shown for two members of the Solanaceae family (Solanum tuberosum, N. benthamiana). The Phytophthora infestans effector Avr3a, the corresponding avirulence gene of R3a, was identified with association genetics. Avr3a encodes a protein that is recognized in the host cytoplasm, where it triggers R3a-dependent cell death (Amstrong et al., 2005). The avirulence gene Avr3a occurs in P. infestans in two forms, the Avr3a_K80I103 (Avr3a^{KI}) or as Avr3a_E80M103 (Avr3a^{EM}) allele. The Avr3a^{KI} allele activates R3a resistance gene dependent innate immunity, whereas Avr3a^{EM} will not be recognized by the R3a gene (Amstrong et al. 2005). Avr3a is essential for the virulence of P. infestans and manipulates plant immunity by stabilizing potato E3 ligase CMPG1 (Bos et al., 2010). In addition, the AVR3a protein associates in potato cells with the dynamin-related protein 2 and suppresses defense responses triggered by flg22 and reduce internalization of the activated PRR FLS2 (Chaparro-Garcia et al., 2015).

[0013] An alternative approach is the expression of the avirulence gene under the control of a pathogen-inducible promoter. In the presence of a constitutively expressed R-gene, the avirulence gene should only be expressed at the time and site of pathogen infection (De Wit, 1992; Joosten and de Wit, 1999). This strategy was applied to the Cf-9/Avr9 gene pair using a 273 base-pair fragment of the pathogen-inducible promoter Gstl from potato (Martini et al., 1993). Although preliminary results showed enhanced resistance of tomato against two fungal pathogens, further optimization of the tight promoter regulation was suggested since promoter specificity was not fully restricted to the infection sites (Strittmatter at al., 1996; Joosten and de Wit, 1999).

[0014] Some transgenic plants which expressed the p50 avirulence gene under control of the 2xS-2xD pathogen-inducible promoter showed resistance to the tumor-inducing bacterium Agrobacterium tumefaciens. The bacteria resistant plants developed minor phenotypes under sterile conditions. However, after transfer to soil, all lines showed spontaneous necrosis of stems and leaves. The necrosis appeared mainly on stems and leaves of older plants. Leaf necrosis started at the tip of the leaf, spread concentrically and finally covered the whole leaf. Stem necrosis started near to soil and the attachment sites of the leaves (Niemeyer 2012).

[0015] Another scenario discussed was the dissection of cell death reaction and disease resistance (Niemeyer et al., 2013).

[0016] However, until today no agronomically attractive approach solving the underlying problem is available. Therefore, there is still a demand for plants with increased resistance or immunity (especially towards fungal pathogens) which do not show abundant cell death or necrosis.

### SUMMARY OF THE INVENTION

[0017] The present invention was made in view of the prior art described above, and the object of the present invention is to provide plants having resistance to one or more pathogens while avoiding undesired necrosis or growth retardations as well as to provide a method for the production of these plants and the agriculture application of these plants.

[0018] The present invention provides a nucleic acid molecule for increasing the resistance of a plant or a part thereof towards at least one plant pathogen, wherein the nucleic acid molecule comprises a nucleotide sequence selected from the group consisting of:

[0019] (a) a nucleotide sequence encoding i) a plant resistance protein of the resistance protein class CC-NBS-LRR and ii) an avirulence protein;

[0020] (b) a nucleotide sequence encoding a plant resistance protein of the resistance protein class CC-NBS-LRR;

[0021] (c) a nucleotide sequence encoding an avirulence protein;

[0022] (d) a nucleotide sequence hybridizing under stringent conditions to a sequence which is complementary to a nucleotide sequence according to (a), (b) or (c); and

[0023] (e) a nucleotide sequence encoding a polypeptide comprising an amino acid sequence which is at least 70% identical to an amino acid sequence according to SEQ ID NO: 93;

[0024] wherein the encoded resistance protein, the encoded avirulence protein, or both, include at least one amino acid substitution in comparison to the wild type amino acid sequence of the resistance and/or avirulence protein, said substitution leading to a decrease of cell death during a hypersensitive reaction.

[0025] A nucleic acid encoding a resistance protein as well as an avirulence protein is an artificial sequence which is manmade and which does not occur in nature. Resistance proteins are of plant origin and avirulence proteins are of plant pathogens origin. Therefore, a nucleic acid sequence encoding a resistance protein and a nucleic acid sequence encoding an avirulence protein are heterologous to each other.

[0026] A resistance protein or an avirulence protein comprising one or more amino acid substitutions as defined herein are artificial products which do not occur in nature. Also, the nucleic acids encoding these proteins are artificial and are not found in nature.

[0027] The present invention also provides a nucleic acid molecule for increasing the resistance of a plant or a part thereof towards at least one plant pathogen, wherein the nucleic acid molecule comprises a nucleotide sequence selected from the group consisting of:

[0028] (a) a nucleotide sequence encoding i) a plant resistance protein of the resistance protein class CC-NBS-LRR and ii) an avirulence protein;

[0029] (b) a nucleotide sequence encoding a plant resistance protein of the resistance protein class CC-NBS-LRR;

[0030] (c) a nucleotide sequence encoding an avirulence protein;

[0031] (d) a nucleotide sequence hybridizing under stringent conditions to a sequence which is complementary to a nucleotide sequence according to (a), (b) or (c); and

[0032] (e) a nucleotide sequence encoding a polypeptide comprising an amino acid sequence which is at least 70% identical to an amino acid sequence according to SEQ ID NO: 93;

[0033] wherein the encoded resistance protein, the encoded avirulence protein, or both, include at least one amino acid substitution wherein the substitution leads to a decrease of cell death during a hypersensitive reaction in comparison to a resistance protein, avirulence protein or both lacking the amino acid substitution. The at least one amino acid substitution can be a substitution in comparison to the wild type amino acid sequence of the resistance and/or avirulence protein.

[0034] In one embodiment, the plant resistance protein is selected from the group consisting of: R3a according to SEQ ID NO 94 as exemplarily encoded by the cDNA of SEQ ID NO 93 or the genomic DNA of SEQ ID NO 268, Rpi-blb3 according to SEQ ID NO 45 as exemplarily encoded by SEQ ID NO 44, R2 according to SEQ ID NO 49 as exemplarily encoded by SEQ ID NO 48, Rpi-abpt according to SEQ ID NO 51 as exemplarily encoded by SEQ ID NO 50, Rpi-edn1 according to SEQ ID NO 53 as exemplarily encoded by SEQ ID NO 52, R1 according to SEQ ID NO 55 as exemplarily encoded by SEQ ID NO 54, Rpi-blb2 according to SEQ ID NO 60 as exemplarily encoded by SEQ ID NO 59, Rpi-blb1 according to SEQ ID NO 65 as exemplarily encoded by SEQ ID NO 64, Rpi-pta1 according to SEQ ID NO 70 as exemplarily encoded by SEQ ID NO 69, Rpi-sto1 according to SEQ ID NO 73 as exemplarily encoded by SEQ ID NO 72, Rpi-vnt1.1 according to SEQ ID NO 76 as exemplarily encoded by SEQ ID NO 75, Rpi-edn2 according to SEQ ID NO 80 as exemplarily encoded by SEQ ID NO 79, R9a according to SEQ ID NO 266, R8 according to SEQ ID NO 86 as exemplarily encoded by SEQ ID NO 85, Rpi-chc1 according to SEQ ID NO 90 as exemplarily encoded by SEQ ID NO 89, R3b according to SEQ ID NO 98 as exemplarily encoded by SEQ ID NO 97, Mla1_barley according to SEQ ID NO 102 as exemplarily encoded by SEQ ID NO 101, Mla13_barley according to SEQ ID NO 106 as exemplarily encoded by SEQ ID NO 105, Rpg1-b_Soybean according to SEQ ID NO 111 as exemplarily encoded by SEQ ID NO 110, RPM1 according to SEQ ID NO 119 as exemplarily encoded by SEQ ID NO 118, RPS2 according to SEQ ID NO 121 as exemplarily encoded by SEQ ID NO 120, RPS5 according to SEQ ID NO 125 as exemplarily encoded by SEQ ID NO 124, BS2 according to SEQ ID NO 129 as exemplarily encoded by SEQ ID NO 128, Rxo1 according to SEQ ID NO 133 as exemplarily encoded by SEQ ID NO 132, I-2_tomato according to SEQ ID NO 137 as exemplarily encoded by SEQ ID NO 136, Pi-ta according to SEQ ID NO 144 as exemplarily encoded by SEQ ID NO 143, Piz-t according to SEQ ID NO 150 as exemplarily encoded by SEQ ID NO 149, Pia Rga4 according to SEQ ID NO 155 as exemplarily encoded by SEQ ID NO 154, Pia Rga5 according to SEQ ID NO 157 as exemplarily encoded by SEQ ID NO 156, Pii-1 according to SEQ ID NO 163 as exemplarily encoded by SEQ ID NO 162, Pik-1 according to SEQ ID NO 167 as exemplarily encoded by SEQ ID NO 166, Pik-2 according to SEQ ID NO 170 as exemplarily encoded by SEQ ID NO 169, Pikh-1 according to SEQ ID NO 173 as exemplarily encoded by SEQ ID NO 172, Pikm1-TS according to SEQ ID NO 179 as exemplarily encoded by SEQ ID NO 178, Pikm2-TS according to SEQ ID NO 182 as exemplarily encoded by SEQ ID NO 181, Pikp-1 according to SEQ ID NO 187 as exemplarily encoded by SEQ ID NO 186, Pikp-2 according to SEQ ID NO 190 as exemplarily encoded by SEQ ID NO 189, Piks-1 according to SEQ ID NO 193 as exemplarily encoded by SEQ ID NO 192, Piks-2 according to SEQ ID NO 196 as exemplarily encoded by SEQ ID NO 195, Rps1k-1_soybean according to SEQ ID NO 199 as exemplarily encoded by SEQ ID NO 198, Rps1k-2_soybean according to SEQ ID NO 205 as exemplarily encoded by SEQ ID NO 204, L3 according to SEQ ID NO 207 as exemplarily encoded by SEQ ID NO 206, N′_tobacco according to SEQ ID NO 211 as exemplarily encoded by SEQ ID NO 210, RX1 according to SEQ ID NO 213 as exemplarily encoded by SEQ ID NO 212, RX2 according to SEQ ID NO 218 as exemplarily encoded by SEQ ID NO 217, Pvr4_pepper according to SEQ ID NO 221, Pvr9_pepper according to SEQ ID NO 225 as exemplarily encoded by SEQ ID NO 224, Tm2_Tomato as exemplarily encoded by SEQ ID NO 228 as exemplarily encoded by SEQ ID NO 227, Tm2\hat{ }2_Tomato according to SEQ ID NO 232 as exemplarily encoded by SEQ ID NO 231, Tsw_pepper according to SEQ ID NO 234 as exemplarily encoded by SEQ ID NO 233, Sw-5b_tomato according to SEQ ID NO 238 as exemplarily encoded by SEQ ID NO 237, Rsv1_3gG2 according to SEQ ID NO 242 as exemplarily encoded by SEQ ID NO 241, Pm2 according to SEQ ID NO 246 as exemplarily encoded by SEQ ID NO 245, PM3A according to SEQ ID NO 252 as exemplarily encoded by SEQ ID NO 251, and PM3F according to SEQ ID NO 258 as exemplarily encoded by SEQ ID NO 257.

[0035] According to one embodiment, the resistance protein is not the potato Rx resistance protein or a mutated form thereof and/or not the tomato Cf-9 resistance protein or a mutated form thereof.

[0036] In a specific embodiment, the nucleic acid according to the invention is encoding a resistance protein, wherein the nucleic acid molecule encodes a plant resistance protein having at least one amino acid substitution within the CC-domain in comparison to the amino acid sequence of a wild type CC-domain. Alternatively, the encoded plant resistance protein can include at least one amino acid substitution within the CC-domain wherein the substitution leads to a decrease of cell death during a hypersensitive reaction in comparison to a resistance protein, lacking the amino acid substitution within the CC-domain.

[0037] According to a further aspect of the invention the amino acid substitution(s) within the resistance protein or the avirulence protein or both of them is not a substitution/are not substitutions that result(s) in a protein variant which is existing in nature. Therefore, a substitution turning the naturally occurring Avr3a-KI protein (including the signal sequence) to the naturally occurring Avr3a-KM protein (including the signal sequence) or the other way round would be excluded according to this aspect.

[0038] In one embodiment, the NBS domain of the resistance protein may comprise an NBS motif.

[0039] In one embodiment, the LRR domain of the resistance protein may comprise an Leu-xx-Leu-xx-Leu-x-Leu-xx-Cys/Asn-xx motif according to SEQ ID NO 272 (where x is any amino acid).

[0040] In another embodiment, the resistance protein is a resistance protein which comprises the amino acid motif according to SEQ ID NO 273 as depicted in FIG. 3.

[0041] In one embodiment, the avirulence protein is selected from the group consisting of: Avr3a_Phytophthora according to SEQ ID NO 96 as exemplarily encoded by SEQ ID NO 95, Avr2_Phytophthora_infestans according to SEQ ID NO 139 as exemplarily encoded by SEQ ID NO 138, Avr1_Phytophthora_infestans according to SEQ ID NO 58 as exemplarily encoded by SEQ ID NO 57, Avrblb2 according to SEQ ID NO 63 as exemplarily encoded by SEQ ID NO 62, Avr-blb1=Avr-sto1 according to SEQ ID NO 68 as exemplarily encoded by SEQ ID NO 67, Avr-vnt1 according to SEQ ID NO 78 as exemplarily encoded by SEQ ID NO 77, Avrblb2 according to SEQ ID NO 82 as exemplarily encoded by SEQ ID NO 81, Avr8_Phytophthora_infestans according to SEQ ID NO 88 as exemplarily encoded by SEQ ID NO 87, PITG_16245 according to SEQ ID NO 92 as exemplarily encoded by SEQ ID NO 91, Avr3b according to SEQ ID NO 100 as exemplarily encoded by SEQ ID NO 99, Avra1_(AvrMla1)_Blumeria according to SEQ ID NO 104 as exemplarily encoded by SEQ ID NO 103, Avra13_(AvrMla13)_Blumeria according to SEQ ID NO 109 as exemplarily encoded by SEQ ID NO 108, AvrB_Pseudomonas according to SEQ ID NO 113 as exemplarily encoded by SEQ ID NO 112, AvrRpm1 according to SEQ ID NO 115 as exemplarily encoded by SEQ ID NO 114, AvrPpiA1_Pseudomonas according to SEQ ID NO 117 as exemplarily encoded by SEQ ID NO 116, AvrRpt2_Pseudomonas according to SEQ ID NO 123 as exemplarily encoded by SEQ ID NO 122, AvrPphB according to SEQ ID NO 127 as exemplarily encoded by SEQ ID NO 126, AvrBs2_Xanthomonas according to SEQ ID NO 131 as exemplarily encoded by SEQ ID NO 130, AvrRxo1 according to SEQ ID NO 135 as exemplarily encoded by SEQ ID NO 134, Avr2 (SIX3)_Fusarium oxysporum according to SEQ ID NO 139 as exemplarily encoded by SEQ ID NO 138, SIX5_Fusarium oxysporum according to SEQ ID NO 141 as exemplarily encoded by SEQ ID NO 140, AVR Pita according to SEQ ID NO 147 as exemplarily encoded by SEQ ID NO 146, AvrPiz-t according to SEQ ID NO 153 as exemplarily encoded by SEQ ID NO 152, AVR1-C039 according to SEQ ID NO 159 as exemplarily encoded by SEQ ID NO 158, AVR-Pia according to SEQ ID NO 161 as exemplarily encoded by SEQ ID NO 160, Avr-Pii according to SEQ ID NO 165 as exemplarily encoded by SEQ ID NO 164, Avr Pik_km_kp allele D according to SEQ ID NO 185 as exemplarily encoded by SEQ ID NO 184, Avr1k_Phytophthora sojae according to SEQ ID NO 201 as exemplarily encoded by SEQ ID NO 200, CP_Pepper mild mottle virus according to SEQ ID NO 209 as exemplarily encoded by SEQ ID NO 208, CP_Potato virus X according to SEQ ID NO 216 as exemplarily encoded by SEQ ID NO 215, Nlb_pepper mottle virus according to SEQ ID NO 223 as exemplarily encoded by SEQ ID NO 222, 30 kDa MP_Tobacco mosaic virus according to SEQ ID NO 230 as exemplarily encoded by SEQ ID NO 229, NSs_Tomato spotted wilt virus (AvrTsw) according to SEQ ID NO 236 as exemplarily encoded by SEQ ID NO 235, NSm_Tomato spotted wilt virus according to SEQ ID NO 240 as exemplarily encoded by SEQ ID NO 239, P3 cistron_soybean mosaic virus according to SEQ ID NO 244 as exemplarily encoded by SEQ ID NO 243, AvrPm2 according to SEQ ID NO 249 as exemplarily encoded by SEQ ID NO 248, and AvrPm3a2_f2 according to SEQ ID NO 255 as exemplarily encoded by SEQ ID NO 254 wherein preferably at least one of the amino acids of such a protein is substituted.

[0042] In a preferred embodiment, the nucleic acid molecule comprises a nucleotide sequence encoding a plant resistance protein of the resistance protein class CC-NBS-LRR and an avirulence protein, wherein the plant resistance protein and the avirulence protein are a combination selected from the following combinations: R3a (CC; AAW48299) and Avr3a_Phytophthora, Rpi-blb3 and Avr2_Phytophthora_infestans, R2 and Avr2_Phytophthora_infestans, Rpi-abpt and Avr2_Phytophthora_infestans, pi-edn1 and Avr2_Phytophthora_infestans, R1 and Avr1_Phytophthora_infestans, Rpi-blb2 and Avrblb2, Rpi-blb1 and Avr-blb1=Avr-sto1, Rpi-pta1 and Avr-blb1=Avr-sto1, Rpi-sto1 and Avr-blb1=Avr-sto1, Rpi-vnt1.1 and Avr-vnt1 (PITG_16294)_Phytophthora, Rpi-edn2 and Avrblb2, R9a and Avrblb2, R8 and Avr8_Phytophthora_infestans, Rpi-chc1 and PITG_16245 (Avr-chc1)_Phytophthora, R3b (CC; AEC47890) and Avr3b (PITG_18215)_Phytophthora, Mla1_barley and Avra1_(AvrMla1)_Blumeria, Mla13_barley and Avra13_(AvrMla13)_Blumeria, Rpg1-b_Soybean and AvrB_Pseudomonas, RPM1 (CC; CAA61131) and AvrB_Pseudomonas, RPM1 (CC; CAA61131) and AvrRpm1, RPM1 (CC; CAA61131) and AvrPpiA1_Pseudomonas, RPS2 (CC; AEE85156) and AvrRpt2_Pseudomonas, RPS5 (CC; AEE28852) and AvrPphB (HopAR1)_Pseudomonas, BS2 (CC; AAF09256) and AvrBs2_Xanthomonas, Rxo1 (AAX31149) and AvrRxo1, 1-2_tomato and Avr2 (SIX3)_Fusarium oxysporum, 1-2_tomato and SIX5_Fusarium oxysporum, Pi-ta (AF207842) and AVR Pita (AF207841), Piz-t (ABC73398) and AvrPiz-t (ACF39937), Pia Rga4 (BAK39922) and AVR1-C039 (AF463528_3), Pia Rga4 (BAK39922) and AVR-Pia (BAH59484), Pia Rga5 (BAK39930) and AVR1-C039 (AF463528_3), Pia Rga5 (BAK39930) and AVR-Pia (BAH59484), Pii-1 (BAN59294) and Avr-Pii (BAH59485), Pik-1 (ADZ48537) and Avr Pik_km_kp allele D (allele pex31-D) (BAH59486), Pik-2 (ADZ48538) and Avr Pik_km_kp allele D (allele pex31-D) (BAH59486), Pikh-1 (AET36549) and Avr Pik_km_kp allele D (allele pex31-D) (BAH59486), Pikh-2 (AET36550) and Avr Pik_km_kp allele D (allele pex31-D) (BAH59486), Pikm1-TS (BAG71909) and Avr Pik_km_kp allele D (allele pex31-D) (BAH59486), Pikm2-TS (BAG71908) and Avr Pik_km_kp allele D (allele pex31-D) (BAH59486), Pikp-1 (ADV58352) and Avr Pik_km_kp allele D (allele pex31-D) (BAH59486), Pikp-2 (ADV58351) and Avr Pik_km_kp allele D (allele pex31-D) (BAH59486), Piks-1 (AET36547) and Avr Pik_km_kp allele D (allele pex31-D) (BAH59486), Piks-2 (AET36548) and Avr Pik_km_kp allele D (allele pex31-D) (BAH59486), Rps1k-1_soybean and Avr1k_Phytophthora sojae, Rps1k-2_soybean and Avr1k_Phytophthora sojae, L3 (CC; BAJ33559) and CP_Pepper mild mottle virus (Avr L3&4), N′_tobacco and CP_Pepper mild mottle virus (Avr L3&4), RX1 (CC; CAB50786) and CP_Potato virus X, RX2 (CC; CAB56299) and CP_Potato virus X, Pvr4_pepper and Nlb_pepper mottle virus (Avr Pvr4&9), Pvr9_pepper and Nlb_pepper mottle virus (Avr Pvr4&9), Tm2_Tomato and 30 kDa MP_Tobacco mosaic virus (AvrTm2), Tm2\hat{ }2_Tomato and 30 kDa MP_Tobacco mosaic virus (AvrTm2), Tsw_pepper and NSs_Tomato spotted wilt virus (AvrTsw), Sw-5b_tomato and NSm_Tomato spotted wilt virus (AvrSw-5b), Rsv1_3gG2 and P3 cistron_soybean mosaic virus (AvrRsv1_3gG2), Pm2 and AvrPm2, PM3A (CC; AAY21626) and AvrPm3a2_f2, and PM3F and AvrPm3a2_f2.

[0043] In one embodiment, the nucleic acid molecule comprises a nucleotide sequence encoding the avirulence protein Avr3a lacking the protein signal sequence and having at least one amino acid substitution in the amino acid sequence of SEQ ID NO: 2, wherein the at least one amino acid substitution is selected from the group consisting of: K59/M82, R59/M82, H59/M82, C59/M82, N59/M82, Q59/M82, T59/M82, S59/M82, M59/M82, G59/M82, A59/M82, L59/M82, V59/M82, 159/M82. In this respect an amino acid substitution “R59/M82” means that the amino acid at position 59 is replaced by the amino acid arginine (“R”) and the amino acid at position 82 is replaced by methionine (“M”). In this respect the positions 59 and 82 can also correspond to the respective position in a variant of the protein according to SEQ ID NO 2. An example for a sequence encoding a protein according to SEQ ID NO 2 is given by the nucleic acid molecule according to SEQ ID NO 1. Therefore, the following artificial sequences of Avr3a having amino acid substitutions are part of the invention:

| | SEQ ID NO | |
|---|---|---|
| | Nucleic acid sequence | SEQ ID NO |
| | encoding the protein | Protein sequence |
| K59/I82 | 1 | 2 |
| K59/M82 | 4 | 5 |
| R59/M82 | 6 | 7 |
| H59/M82 | 8 | 9 |
| D59/M82 | 10 | 11 |
| E59/M82 | 12 | 13 |
| F59/M82 | 14 | 15 |
| Y59/M82 | 16 | 17 |
| W59/M82 | 18 | 19 |
| P59/M82 | 20 | 21 |
| C59/M82 | 22 | 23 |
| N59/M82 | 24 | 25 |
| Q59/M82 | 26 | 27 |
| T59/M82 | 28 | 29 |
| S59/M82 | 30 | 31 |
| M59/M82 | 32 | 33 |
| G59/M82 | 34 | 35 |
| A59/M82 | 36 | 37 |
| L59/M82 | 38 | 39 |
| V59/M82 | 40 | 41 |
| I59/M82 | 42 | 43 |

[0044] Avirulence proteins which occur in nature are proteins that are secreted (usually from the pathogen to the infested plant) and therefore naturally occurring avirulence proteins have a signal sequence. Avirulence proteins which lack the signal sequence and the nucleic acids which encode such proteins are manmade and do not occur in nature.

[0045] In one embodiment, the nucleic acid molecule comprises a nucleotide sequence encoding the wildtype avirulence protein Avr3a including the signal sequence and having at least one amino acid substitution in the amino acid sequence of SEQ ID NO: 267, wherein the at least one amino acid substitution is selected from the group consisting of: K80/I103 (already included in SEQ ID NO 267), K80/M103, R80/M103, H80/M103, C80/M103, N80/M103, Q80/M103, T80/M103, S80/M103, M80/M103, G80/M103, A80/M103, L80/M103, V80/M103, I80/M103. An example for a sequence encoding a protein according to SEQ ID NO 267 is given by the nucleic acid molecule according to SEQ ID NO 3.

[0046] In one embodiment, the nucleic acid molecule comprises a nucleotide sequence encoding a plant resistance protein having at least one amino acid substitution within the CC-domain of the wild type protein. Preferably, the at least one amino acid substitution in the plant resistance protein is selected from the group consisting of: (a) an amino acid substitution within the DAE motif of resistance protein BvKWS3_165 encoded by the nucleic acid sequence according to SEQ ID NO 274 wherein the DAE motif expands from amino acid position 56 to amino acid position 58 in the amino acid sequence according to SEQ ID NO 263,; (b) an amino acid substitution within the DAE motif of resistance protein Bv123 encoded by the nucleic acid sequence according to SEQ ID NO 276 wherein the DAE motif expands from amino acid position 57 to amino acid position 59 of SEQ ID NO: 261, and (c) an amino acid substitution within the DAE motif of resistance protein R3a wherein the DAE motif expands from amino acid position 59 to amino acid position 61 of SEQ ID NO: 265. The amino acid sequence of SEQ ID NO: 263 is exemplarily encoded by the nucleic acid molecule according to SEQ ID NO: 262. More preferably, the at least one amino acid substitution is within the D or E of the DAE motif of BvKWS3_165, Bv123, or R3a. The amino acid sequence of SEQ ID NO: 261 is exemplarily encoded by the nucleic acid molecule according to SEQ ID NO: 260. The amino acid sequence of SEQ ID NO: 265 is exemplarily encoded by the nucleic acid molecule according to SEQ ID NO: 264.

[0047] In a preferred embodiment, the plant resistance protein is R3a having the wild type amino acid sequence of SEQ ID NO: 269, wherein said wild type amino acid sequence has at least one substitution selected from the group consisting of: K35E, K37M, E61V, E61K, E135N und E136N. In the case of “K35E” this means for example that the amino acid K at position 35 is replaced by E.

[0048] Moreover, provided is a cell comprising the nucleic acid molecule, the polypeptide, or the vector or expression cassette of the present invention. Preferably, the cell comprises the nucleic acid molecule of the present invention as a transgene or as an endogene. The cell may be for example an eucaryotic cell like a plant cell or a yeast cell. However, the cell may be for example also a procaryotic cell like a bacterial cell wherein the bacterial cell may be for example a cell of E. coli or Agrobacterium tumefaciens.

[0049] Further provided is a plant or part thereof comprising the nucleic acid molecule of the present invention or comprising the cell of the present invention, and a plant or part thereof regenerated from said cell.

[0050] Also provided is a seed or offspring from the plant of the present invention, wherein the seed or the offspring comprises the nucleic acid molecule of the present invention as a transgene or an endogene.

[0051] The present invention also provides a method for increasing a plant's resistance towards at least one plant pathogen. In one embodiment, said method comprises the steps of integrating the nucleic acid molecule of the present invention into the genome of at least one cell of a plant and regenerating a plant from that cell. Alternatively, said method comprises the steps of transforming a plant cell with a nucleic acid molecule of the present invention, or the vector or the expression cassette of the present invention, and regenerating a plant from that cell. Further, the present invention provides a method for the identification of a plant comprising the nucleic acid molecule of the present invention, said method comprising the steps of isolating DNA from the plant of the present invention or part thereof, and performing a polymerase chain reaction using the isolated DNA as a template, thereby amplifying the nucleic acid molecule of the present invention or a part thereof. Preferably the method for identification will detect not only the presence of a nucleic acid molecule according to the present invention but will also detect at least one of the amino acid substitutions encoded by the nucleic acid molecule.

### BRIEF DESCRIPTION OF THE DRAWINGS

[0052] FIG. 1: Classification of plant resistance genes into five groups (modified after Dangl and Jones, 2001). TIR-NBS-LRR and CC-NBS-LRR proteins are located in the cytoplasm of the plant cells. They have a NBS (nucleotide binding site) and a LRR (leucine rich repeat) domain in common. They differ at the N-terminus by the TIR (Toll/interleukin receptor) and CC (coiled-coil) domain. The CC-NBS-LRR will be subdivided into the CC_{EDVID}-NBS-LRR, CC_{DAE}-NBS-LRR and CC_{R}-NBS-LRR types according this patent disclosure. RLK (receptor-like-kinase) and RLP (receptor-like-proteins) are membrane-bound receptors. A RLK receptor has a LRR at the N-terminus, followed by a transmembrane domain and a kinase domain at the C-terminus. The RLP receptor consists of a LRR domain, followed by a transmembrane domain. The Pto like kinase type consists of a kinase domain.

[0053] FIG. 2: Detrimental effect of R3a-Avr3a co-expression in adult but not in young plants. The transgenic lines T-047, T-036, T-029 and T-071, which were transformed with the R3a-Avr3a genes, showed leaf abortion and stunted growth as adult but not as young plants. Expression analysis by qRT-PCR showed that the Avr3a gene is stronger expressed in young plants than in adult plants. The negative phenotype of adult R3a-Avr3a lines correlates with Avr3a^{KI} expression. Avr3a^{KI} expression was normalized against expression of the potato house-keeping gene StMCB75. n=4, ±indicates standard derivation.

[0054] FIG. 3: Comparison of the CC_{DAE}-domains from the R-proteins BvKWS3_165 according to SEQ ID NO 263 exemplarily encoded by the nucleic acid according to SEQ ID NO 262, Bv123 protein according to SEQ ID NO 261 exemplarily encoded by the nucleic acid according to SEQ ID NO 260 and StR3a protein according to SEQ ID NO 265 exemplarily encoded by the nucleic acid according to SEQ ID NO 264. Identical amino acids of the resistance proteins from sugar beet (BvKWS3_165, Bv123) and potato (StR3a) are highlighted with black background. The DAE motif, which was used for the classification of the CC-type, is highly conserved and located at position 56-58 (BvKWS3_165), 57-59 (Bv123) and 59-61 (StR3a). The EDVID motif is conserved as EDILD consensus sequence and located at position 82-86 (BvKWS3_165), 83-87 (Bv123) and 85-89 (StR3a). The size of the CC-domains is given as numbers, e.g. #175=175 amino acids. Also depicted is a consensus motif according to SEQ ID NO 273 deduced from the three sequences.

[0055] FIG. 4a and FIG. 4b: Generation of R3a gene variants with reduced cell death activity by single amino acid exchanges of the CC_{DAE}-domain (FIG. 4a). Generated R3a alleles showed reduced cell death after co-expression with the Avr3a^{KI} gene. In each construct (the last six columns), one amino acid of the CC_{DAE}-domain was exchanged in the CC-NBS-LRR protein (e.g. K35E=K at position 35 was replaced by E). The strongest cell death was observed for the native R3a gene (3rd column showing results for “AVR3a+R3a”). The number describe the level of cell death after ballistic transformation of potato leaves (0=max. cell death, 100=no cell death detected). pCaMV-2=empty vector (negative control). The standard derivation of the mean from 3 experiments with 6 replicates is given by error bars (FIG. 4b).

[0056] FIG. 5 to FIG. 8: Allelic variants of the Avr3a gene trigger different levels of cell death in potato leaves. Avr3a variants under the control of the doubled 35S promoter trigger different levels of cell death after transient expression in potato leaves of the R3a cultivar Hermes. The mean of three independent experiments is shown (n=18). Empty vector (expression vector without Avr3a gene) was set to 100, Avr3aKI (native avirulent allele). The Shapiro Wilk test was performed for normality distribution of the data. Data with different letters are significantly different according ANOVA and Tukey test (multiple t-test, p<0.05).

[0057] FIG. 9: Comparison of cell death strength induced by allelic variants of the Avr3a gene (s. FIG. 5-8) in potato leaves.

[0058] FIG. 10: Phenotype of the potato lines Avr3a^{GM}-T-024 and Avr3a^{IM}-T-112 compared to the potato cultivar Hermes. Adult plants of lines transformed with the Avr3a^{GM} and Avr3a^{IM} gene under the control of the synthetic-fungal inducible promoter 2xS-4xD-NpCABE showed the same phenotype as the cultivar Hermes, which was used for transformation.

[0059] FIG. 11a and FIG. 11b: Enhanced late blight resistance of line Avr3a^{GM}-T-024 in comparison to Hermes and a transgenic control (RNAi-GFP). The top 5 leaflets of each potato leaf were locally inoculated with one drop of sporangia (20 μl with 600 sporangia). Photos were taken at 5 dpi.

[0060] FIG. 12a and FIG. 12b: Expression analysis of the Avr3a gene in P. infestans infected and control leaves of potato by qRT-PCR. The transgenic line with the best late blight resistance, Avr3a^{GM}-T-024, showed the highest expression of the recombinant Avr3a gene after infection at 2, 3 and 4 dpi. Selected primers S3169 and S3170 allowed the specific detection of the recombinant Avr3a gene expression in the presence of P. infestans. Avr3a expression was normalized against the potato gene StMCB75. Black column=infected leaves, grey column=control leaves. n=4. dpi=days after inoculation, ko=non-infected leaves. ±indicates standard derivation.

[0061] FIG. 13: The threshold of cell death induction is increased by application of Avr3a^{GM} in comparison to the native Avr3a^{KI} gene. Expression of the Avr3a^{KI} and Avr3a^{GM} genes in leaves of adult greenhouse plants was determined by qRT-PCR using the gene specific primers S3169 and S3170. The transgenic lines T-047, T-036, T-029 and T-071, which were transformed with the R3a-Avr3a^{KI} genes, showed leaf abortion and stunted growth (see FIG. 2). The level of leaf damage correlated with the Avr3a^{KI} expression. Even the Avr3a^{KI} low expressing line T-047 showed visible leaf abortion. This indicated that the threshold for cell death induction is less than 1.8 relative units for the Avr3a^{KI} expressing lines. In contrast, the R3a-Avr3a^{GM} co-expressing line Avr3a^{GM}-T024 did not show a negative phenotype and revealed a Avr3a^{GM} expression of 146.5±30.1 relative units. This result demonstrated that the threshold for cell death induction is greater than 200 relative units for the modified Avr3a gene in line Avr3a^{GM}-T-024. Avr3a expression was normalized against expression of the potato house-keeping gene StMCB75 n=4, ±indicates standard derivation.

[0062] FIG. 14a and FIG. 14b: Enhanced early blight (Alternaria solani) resistance of line Avr3a^{GM}-T-024 in comparison to Hermes and a transgenic control (RNAi-GFP). Greenhouse plants were scored for natural A. solani infection (n=8 rows with 3 plants each). 0=healthy leaves, 100=completely destroyed leaves. Differences between samples were assessed by using analysis of variance (ANOVA). *Significant different according ANOVA to Hermes, RNAi-GFP and Avr3a^{GM}-T-014, p<0.05.

[0063] FIG. 15a, FIG. 15b and FIG. 15c: R3a-Avr3a^{KI} co-expression activates cell death, the hallmark of innate immunity, in corn, soybean and wheat leaves. The potato R3a resistance gene and the Avr3a^{KI} gene of P. infestans were transiently co-expressed in leaves of corn, soybean and wheat. The induction of cell death was measured by the activity of two co-bombarded luciferase reporter genes 16 h after transformation. An auto-activated wheat resistance gene and an auto-activated soybean resistance gene were used as “positive controls” for wheat, corn and soybean.

[0064] FIG. 16a, FIG. 16b and FIG. 16c: In contrast to R3a-Avr3a^{KI} co-expression, the co-expression of R1-Avr1 does not activate cell death in corn, soybean and wheat leaves. The potato R1 resistance gene and the Avr1 gene of P. infestans were transiently co-expressed in leaves of corn, soybean and wheat. The induction of cell death was measured by the activity of two co-bombarded luciferase reporter genes 16 h after transformation; an auto-activated wheat resistance gene and an auto-activated soybean resistance gene were used as “positive controls” for wheat, corn and soybean.

[0065] FIG. 17a, FIG. 17b and FIG. 17c: In contrast to R3a-Avr3a^{KI} co-expression, the co-expression of Rx1-PVX-CP does not activate cell death in corn, soybean and wheat leaves. The potato Rx1 resistance gene and the gene encoding the coat protein of Potato virus X (PVX-CP) were transiently co-expressed in leaves of corn, soybean and wheat. The induction of cell death was measured by the activity of two co-bombarded luciferase reporter genes 16 h after transformation. An auto-activated wheat resistance gene and an auto-activated soybean resistance gene were used as “positive controls” for wheat, corn and soybean.

[0066] FIG. 18: Vectormap of the vector pBIN. The vector comprises the AVR3a gene as avirulence gene and R3a as resistance gene. The avirulence gene is under control of a promoter construct comprising the NpCABE minimal promoter and the 2xS-4xD cis-regulatory elements. The resistance gene is under control of the R3a promoter. The genes NPTII, NPTIII and tetR are included in the vector for conferring resistance to selective agents. LB=left border of the T-DNA (transfer DNA); RB=right border of the T-DNA; the vector is suitable for stable integration of the avirulence gene and the resistance gene into a plant genome and subsequent expression of the genes.

[0067] FIG. 19: Schematic construction of an expression cassette including the resistance gene R3a and the avirulence gene Avr3a^{KI}. The expression cassette is usable for expression of the included genes.

### DETAILED DESCRIPTION OF THE INVENTION

[0068] The present invention is based on the discovery that genetically modified genes involved in the gene-for-gene interaction can be used to decrease cell death and to prevent the undesired activation of defense reactions in the absence of pathogens. Mutagenized versions of native resistance genes or Avr genes having reduced cell death-inducing activity were generated and applied, in order to decrease cell death, e.g. by increasing the threshold for the induction of cell death. Genetic elements of the gene-for-gene interaction having reduced cell death-inducing activity were shown to decrease cell death and to prevent the undesired activation of defense reactions in the absence of pathogens. At the same time, the modified genes were still capable of activating the innate immunity during pathogen infection. The inventive technology was successfully tested for the CC-NBS-LRR resistance gene R3a of potato and the Avr3a gene of P. infestans. The same technology may be applied to any CC-NBS-LRR resistance gene of a crop and the matching avirulence gene. In addition, it was shown that the R3a-Avr3a gene combination induces cell death in corn, soybean and wheat. Hence, the findings of the present invention were successfully transferred to these other crops. A list of additional CC-NBS-LRR resistance genes and their corresponding AVR genes which may be used in the methods of the invention is provided.

[0069] Accordingly, the present invention provides a nucleic acid molecule for increasing the resistance of a plant or a part thereof towards at least one plant pathogen, wherein the nucleic acid molecule comprises a nucleotide sequence selected from the group consisting of:

[0070] (a) a nucleotide sequence encoding i) a plant resistance protein of the resistance protein class CC-NBS-LRR and ii) an avirulence protein;

[0071] (b) a nucleotide sequence encoding a plant resistance protein of the resistance protein class CC-NBS-LRR;

[0072] (c) a nucleotide sequence encoding an avirulence protein;

[0073] (d) a nucleotide sequence hybridizing under stringent conditions to a sequence which is complementary to a nucleotide sequence according to (a), (b) or (c); and

[0074] (e) a nucleotide sequence encoding a polypeptide comprising an amino acid sequence which is at least 70% identical to an amino acid sequence according to SEQ ID NO: 93 or 271;

[0075] wherein the encoded resistance protein, the encoded avirulence protein, or both, include at least one amino acid substitution in comparison to the wild type amino acid sequence of the resistance and/or avirulence protein, said substitution leading to a decrease of cell death during a hypersensitive reaction.

[0076] Preferably, the at least one amino acid substitution is an amino acid substitution outside of the signal sequence of the encoded resistance protein or the encoded avirulence protein.

[0077] The expression “resistance” or “resistant” as regards a pathogen should be understood to mean the ability of a plant or plant cell to resist the damaging effects of the pathogen and extends from a delay in the development of disease to complete suppression of the development of the disease. The resistance may be complete or partial and may be specific or non-specific to the pathogen race. A conferred resistance may be a newly inherited resistance or an increase in a partial resistance which is already extant.

[0078] Resistance may be quantified by methods known in the art. For example, resistance may be quantified by a reduced fungal biomass on the host plant; for this, the fungal DNA may be determined with the aid of quantitative PCR in comparison to the plant DNA in the infested plant tissue. An additional approach to the measurement of resistance is optical rating, wherein rating scores of 1 (not susceptible) to 9 (very susceptible) are awarded. An increased resistance can be measured by for example inoculation of a healthy leaf with an isolate of the pathogen and the determination of the infested surface after determined number of days (for example 15 days). A reduce of 5% of the infested surface corresponds to an increase of the resistance of 5%.

[0079] Plant: A plant can be a dicot or a monocot. Plants which can be agronomically exploited are preferred. Examples of plants which can be used in context of the invention are sugar beet or red beet; potato; corn; cotton, rape; Poaceae including cereals like wheat, barley, rye, rice, oat, millet; sugar cane, sunflower; Fabaceae like soybean, beans, peanuts, lentils and lupins.

[0080] Part of a plant: In general, every organ or tissue of a plant form a part of a plant. A part of a plant can be leaves, stems, roots, emerged radicles, flowers, flower parts, petals, fruits, pollen, pollen tubes, anther filaments, ovules, embryo sacs, egg cells, ovaries, zygotes, embryos, zygotic embryos, somatic embryos, apical meristems, vascular bundles, pericycles, seeds, roots, and cuttings.

[0081] Pathogen: A “pathogen” as used herein refers to an organism which can infect a plant, or which can cause a disease in a plant. Pathogens which can infect a plant, or which can cause a disease in a plant, include fungi, oomycetes, bacteria, viruses, viroids, virus-like organisms, phytoplasmas, protozoa, nematodes and parasitic plants. Plant parasites can cause damage by feeding on a plant and can be selected from ectoparasites like insects, comprising aphids and other sap-sucking insect, mites, and vertebrates. Examples for fungal pathogens which are especially suitable to be combated by the present invention are Alternaria solani, Phytophthora infestans, Blumeria graminis or fungi belonging to the genus of Fusarium.

[0082] Plant resistance protein: The plant resistance proteins are key molecules for the activation of the induced defense mechanisms. According to the gene-for-gene postulate a resistance interacts directly or indirectly with a corresponding protein encoded by pathogen's avirulence gene (Avr-gene) and thereby triggers the induced defensive reaction. CC-NBS-LRR proteins may comprise three domains: A coiled-coil domain (CC), a NBS comain (nucleotide binding site) and a LRR domain (leucin-rich repeat). In the context of this invention CC-NBS-LRR proteins may also be such proteins which comprise the amino acid sequence VLSDAE or the motif VLSDAEXKQ as depticted in FIG. 3 (wherein X can be every genetically encodable amino acid). This motif is also suitable to characterize or identify the CC domain wherein the cc domain my beginn 56 amino acids in n-terminal direction from the position of the amino acid sequence VLSDAE according to SEQ ID NO: 282 or the motif VLSDAEXKQ (with V being position 0) according to SEQ ID NO: 283. Furthermore, the CC domain may stretch 129 amino acids towards in c-terminal direction from the position of the amino acid sequence according to SEQ ID NO: 282 (with E being position 0) or 127 amino acids from the position of the motif according to SEQ ID NO: 283 (with Q being position 0).

[0083] Avirulence protein: An avirulence protein is produced by a plant pathogen and is able for direct or indirect chemical interaction with a corresponding plant resistance protein wherein this interaction triggers a hypersensitive reaction (defense reaction) within a plant cell.

[0084] Variant: Variants of proteins or of nucleic acids encompass for example homologs, orthologs, or allelic variants.

[0085] Hybridize: The term “hybridize” or “hybridization” should be understood to mean a procedure in which a single stranded nucleic acid molecule agglomerates with a nucleic acid strand which is as complementary as possible, i.e. base-pairs with it. Examples of standard methods for hybridization have been described in 2001 by Sambrook et al. Preferably, this should be understood to mean that at least 60%, more preferably at least 65%, 70%, 75%, 80% or 85%, particularly preferably 90%, 91%, 92%, 93%, 94%, 95%, 96%, 97%, 98% or 99% of the bases of the nucleic acid molecule undergo base pairing with the nucleic acid strand which is as complementary as possible. The possibility of such agglomeration depends on the stringency of the hybridization conditions. The term “stringency” refers to the hybridization conditions. High stringency is when base pairing is more difficult, low stringency is when base pairing is easier.

[0086] The stringency of the hybridization conditions depends, for example, on the salt concentration or ionic strength and the temperature. In general, the stringency can be increased by raising the temperature and/or by reducing the salt content. The term “stringent hybridization conditions” should be understood to mean those conditions under which a hybridization takes place primarily only between homologous nucleic acid molecules. The term “hybridization conditions” in this respect refers not only to the actual conditions prevailing during actual agglomeration of the nucleic acids, but also to the conditions prevailing during the subsequent washing steps. Examples of high stringent hybridization conditions are conditions under which primarily only those nucleic acid molecules that have at least 90% or at least 95% sequence identity undergo hybridization. Such high stringent hybridization conditions are, for example: 4×SSC at 65° C. and subsequent multiple washes in 0.1×SSC at 65° C. for approximately 1 hour. The term “high stringent hybridization conditions” as used herein may also mean: hybridization at 68° C. in 0.25 M sodium phosphate, pH 7.2, 7% SDS, 1 mM EDTA and 1% BSA for 16 hours and subsequently washing twice with 2×SSC and 0.1% SDS at 68° C. Preferably, hybridization takes place under stringent conditions. Less stringent hybridization conditions are, for example: hybridizing in 4×SSC at 37° C. and subsequent multiple washing in 1×SSC at room temperature.

[0087] Hypersensitive reaction: A plant defense reaction including the controlled cellular death of the host tissue at the infection site, the strengthening of the plant cell wall by lignification and callose formation, the formation of phytoalexins and the production of PR-(pathogenesis-related) proteins.

[0088] Decrease/reduction of cell death and reduced cell death-inducing activity: Characteristic of a protein which comprises at least one amino acid substitution and is suitable to increase the resistance towards at least one pathogen. The decrease or reduction of cell death is evident due to a reduced number of leaf abortion during the development of a plant in comparison to a plant comprising the protein having the corresponding wild type amino acid sequence without substitution of at least one amino acid.

[0089] An alternative approach to proof that a resistance inducing protein leads to decreased or reduced cell death is the biolistic transformation of a leaf with an expression cassette comprising a nucleic acid encoding a protein according to the invention and a second leaf treated in the same way using a sequence encoding a protein without amino acid substitution wherein both leaves are co-transformed with a luciferase reporter gene. After 16 h the induction of cell death is measured by the activity of the expressed luciferase. A nucleic acid leading to more luciferase activity than the nucleic acid of the comparison-leaf shows reduced induction of cell death.

[0090] Signal sequence of a protein: An amino acid sequence within a protein which is usually located in the n-terminal part of a protein and can for example begin after the first n-terminal amino acid. Signal sequences usually consist of 13-36 amino acids. In most cases they possess a central, strong hydrophobic part which extends over 10-15 amino acids along which often can be found: alanine, leucine, valine, isoleucine and phenylalanine. The signal sequence is usually responsible for the transportation of the protein to its final location within the cell. However, the signal sequence is not always necessary for the function of a protein and is often removed after the protein has reached its final localization. For example, a plant's immune system usually can recognize pathogenic Avr proteins even if those Avr proteins lack their naturally occurring signal sequence.

[0091] Wild type amino acid sequence or wild type protein: A sequence of amino acids building a protein compound which is existing in nature.

[0092] Substitution leading to a decrease of cell death during a hypersensitive reaction: Is a substitution in the amino acid sequence of a resistance protein and/or avirulence protein. The cell death rate during or as consequence of a hypersensitive reaction (wherein the triggering or maintenance of the hypersensitive reaction is affected either by the resistance protein or the avirulence protein or both) is reduced in comparison to a hypersensitive reaction (occurring under comparable circumstances) the triggering or maintenance of which is affected by the resistance protein or avirulence protein or both lacking the substitution. However, the proteins comprising the substitution are still able to affect the triggerance or maintenance of a hypersensitive reaction and are therefore functional proteins wherein substitution leading to a complete loss of function are not encompassed.

[0093] In one embodiment, the plant resistance protein is selected from the group consisting of: R3a (CC; AAW48299), Rpi-blb3, R2, Rpi-abpt, Rpi-edn1, R1, Rpi-blb2, Rpi-blb1, Rpi-pta1, Rpi-sto1, Rpi-vnt1.1, Rpi-edn2, R9a, R8, Rpi-chc1, R3b (CC; AEC47890), Mla1_barley, Mla13_barley, Rpg1-b_Soybean, RPM1 (CC; CAA61131), RPS2 (CC; AEE85156), RPS5 (CC; AEE28852), BS2 (CC; AAF09256), Rxo1 (AAX31149), I-2_tomato, Pi-ta (AF207842), Piz-t (ABC73398), Pia Rga4 (BAK39922), Pia Rga5 (BAK39930), Pii-1 (BAN59294), Pik-1 (ADZ48537), Pik-2 (ADZ48538), Pikh-1 (AET36549), Pikm1-TS (BAG71909), Pikm2-TS (BAG71908), Pikp-1 (ADV58352), Pikp-2 (ADV58351), Piks-1 (AET36547), Piks-2 (AET36548), Rps1k-1_soybean, Rps1k-2_soybean, L3 (CC; BAJ33559), N′_tobacco, RX1 (CC; CAB50786), RX2 (CC; CAB56299), Pvr4_pepper, Pvr9_pepper, Tm2_Tomato, Tm2\hat{ }2_Tomato, Tsw_pepper, Sw-5b_tomato, Rsv1_3gG2, Pm2, PM3A (CC; AAY21626), and PM3F.

[0094] In another embodiment, the avirulence protein is selected from the group consisting of: Avr3a_Phytophthora, Avr2_Phytophthora_infestans, Avr1_Phytophthora_infestans, Avrblb2, Avr-blb1=Avr-sto1, Avr-vnt1 (PITG_16294)_Phytophthora, Avrblb2, Avr8_Phytophthora_infestans, PITG_16245 (Avr-chc1)_Phytophthora, Avr3b (PITG_18215)_Phytophthora, Avra1_(AvrMla1)_Blumeria, Avra13_(AvrMla13)_Blumeria, AvrB_Pseudomonas, AvrRpm1, AvrPpiA1_Pseudomonas, AvrRpt2_Pseudomonas, AvrPphB (HopAR1)_Pseudomonas, AvrBs2_Xanthomonas, AvrRxo1, Avr2 (SIX3)_Fusarium oxysporum, SIX5_Fusarium oxysporum, AVR Pita (AF207841), AvrPiz-t (ACF39937), AVR1-C039 (AF463528_3), AVR-Pia (BAH59484), Avr-Pii (BAH59485), Avr Pik_km_kp allele D (allele pex31-D) (BAH59486), Avr1 k_Phytophthora sojae, CP_Pepper mild mottle virus (Avr L3&4), CP_Potato virus X, Nlb_pepper mottle virus (Avr Pvr4&9), 30 kDa MP_Tobacco mosaic virus (AvrTm2), NSs_Tomato spotted wilt virus (AvrTsw), NSm_Tomato spotted wilt virus (AvrSw-5b), P3 cistron_soybean mosaic virus (AvrRsv1_3gG2), AvrPm2, and AvrPm3a2_f2.

[0095] In yet another embodiment, the nucleic acid molecule comprises a nucleotide sequence encoding a plant resistance protein of the resistance protein class CC-NBS-LRR and an avirulence protein, wherein the plant resistance protein and the avirulence protein are a combination selected from the following combinations: R3a (CC; AAW48299) and Avr3a_Phytophthora, Rpi-blb3 and Avr2_Phytophthora_infestans, R2 and Avr2_Phytophthora_infestans, Rpi-abpt and Avr2_Phytophthora_infestans, pi-edn1 and Avr2_Phytophthora_infestans, R1 and Avr1_Phytophthora_infestans, Rpi-blb2 and Avrblb2, Rpi-blb1 and Avr-blb1=Avr-sto1, Rpi-pta1 and Avr-blb1=Avr-sto1, Rpi-sto1 and Avr-blb1=Avr-sto1, Rpi-vnt1.1 and Avr-vnt1 (PITG_16294)_Phytophthora, Rpi-edn2 and Avrblb2, R9a and Avrblb2, R8 and Avr8_Phytophthora_infestans, Rpi-chc1 and PITG_16245 (Avr-chc1)_Phytophthora, R3b (CC; AEC47890) and Avr3b (PITG_18215)_Phytophthora, Mla1_barley and Avra1_(AvrMla1)_Blumeria, Mla13_barley and Avra13_(AvrMla13)_Blumeria, Rpg1-b_Soybean and AvrB_Pseudomonas, RPM1 (CC; CAA61131) and AvrB_Pseudomonas, RPM1 (CC; CAA61131) and AvrRpm1, RPM1 (CC; CAA61131) and AvrPpiA1_Pseudomonas, RPS2 (CC; AEE85156) and AvrRpt2_Pseudomonas, RPS5 (CC; AEE28852) and AvrPphB (HopAR1)_Pseudomonas, BS2 (CC; AAF09256) and AvrBs2_Xanthomonas, Rxo1 (AAX31149) and AvrRxo1, 1-2_tomato and Avr2 (SIX3)_Fusarium oxysporum, 1-2_tomato and SIX5_Fusarium oxysporum, Pi-ta (AF207842) and AVR Pita (AF207841), Piz-t (ABC73398) and AvrPiz-t (ACF39937), Pia Rga4 (BAK39922) and AVR1-C039 (AF463528_3), Pia Rga4 (BAK39922) and AVR-Pia (BAH59484), Pia Rga5 (BAK39930) and AVR1-C039 (AF463528_3), Pia Rga5 (BAK39930) and AVR-Pia (BAH59484), Pii-1 (BAN59294) and Avr-Pii (BAH59485), Pik-1 (ADZ48537) and Avr Pik_km_kp allele D (allele pex31-D) (BAH59486), Pik-2 (ADZ48538) and Avr Pik_km_kp allele D (allele pex31-D) (BAH59486), Pikh-1 (AET36549) and Avr Pik_km_kp allele D (allele pex31-D) (BAH59486), Pikh-2 (AET36550) and Avr Pik_km_kp allele D (allele pex31-D) (BAH59486), Pikm1-TS (BAG71909) and Avr Pik_km_kp allele D (allele pex31-D) (BAH59486), Pikm2-TS (BAG71908) and Avr Pik_km_kp allele D (allele pex31-D) (BAH59486), Pikp-1 (ADV58352) and Avr Pik_km_kp allele D (allele pex31-D) (BAH59486), Pikp-2 (ADV58351) and Avr Pik_km_kp allele D (allele pex31-D) (BAH59486), Piks-1 (AET36547) and Avr Pik_km_kp allele D (allele pex31-D) (BAH59486), Piks-2 (AET36548) and Avr Pik_km_kp allele D (allele pex31-D) (BAH59486), Rps1k-1_soybean and Avr1 k_Phytophthora sojae, Rps1k-2_soybean and Avr1 k_Phytophthora sojae, L3 (CC; BAJ33559) and CP_Pepper mild mottle virus (Avr L3&4), N′_tobacco and CP_Pepper mild mottle virus (Avr L3&4), RX1 (CC; CAB50786) and CP_Potato virus X, RX2 (CC; CAB56299) and CP_Potato virus X, Pvr4_pepper and Nlb_pepper mottle virus (Avr Pvr4&9), Pvr9_pepper and Nlb_pepper mottle virus (Avr Pvr4&9), Tm2_Tomato and 30 kDa MP_Tobacco mosaic virus (AvrTm2), Tm2\hat{ }2_Tomato and 30 kDa MP_Tobacco mosaic virus (AvrTm2), Tsw_pepper and NSs_Tomato spotted wilt virus (AvrTsw), Sw-5b_tomato and NSm_Tomato spotted wilt virus (AvrSw-5b), Rsv1_3gG2 and P3 cistron_soybean mosaic virus (AvrRsv1_3gG2), Pm2 and AvrPm2, PM3A (CC; AAY21626) and AvrPm3a2_f2, and PM3F and AvrPm3a2_f2.

[0096] In one embodiment the nucleic acid molecule according to the invention encodes
[0097] i) a plant resistance protein of the resistance protein class CC-NBS-LRR and
[0098] ii) an avirulence protein;
[0099] and wherein the plant resistance protein and the avirulence protein are a combination selected from the group consisting of:
[0100] i) SEQ ID NO 94 and SEQ ID NO 96,
[0101] ii) SEQ ID NO 45 and SEQ ID NO 47,
[0102] iii) SEQ ID NO 49 and SEQ ID NO 47,
[0103] iv) SEQ ID NO 51 and SEQ ID NO 47,
[0104] v) SEQ ID NO 53 and SEQ ID NO 47,
[0105] vi) SEQ ID NO 55 and SEQ ID NO 58,
[0106] vii) SEQ ID NO 60 and SEQ ID NO 63,
[0107] viii) SEQ ID NO 65 and SEQ ID NO 68,
[0108] ix) SEQ ID NO 70 and SEQ ID NO 68,
[0109] x) SEQ ID NO 73 and SEQ ID NO 68,
[0110] xi) SEQ ID NO 76 and SEQ ID NO 78,
[0111] xii) SEQ ID NO 80 and SEQ ID NO 82,
[0112] xiii) SEQ ID NO 266 and SEQ ID NO 82,
[0113] xiv) SEQ ID NO 86 and SEQ ID NO 88,
[0114] xv) SEQ ID NO 90 and SEQ ID NO 92,
[0115] xvi) SEQ ID NO 98 and SEQ ID NO 100,
[0116] xvii) SEQ ID NO 102 and SEQ ID NO 104,
[0117] xviii) SEQ ID NO 106 and SEQ ID NO 109,
[0118] xix) SEQ ID NO 111 and SEQ ID NO 113,
[0119] xx) SEQ ID NO 119 and SEQ ID NO 113,
[0120] xxi) SEQ ID NO 119 and SEQ ID NO 115,
[0121] xxii) SEQ ID NO 119 and SEQ ID NO 117,
[0122] xxiii) SEQ ID NO 121 and SEQ ID NO 123,
[0123] xxiv) SEQ ID NO 125 and SEQ ID NO 127,
[0124] xxv) SEQ ID NO 129 and SEQ ID NO 131,
[0125] xxvi) SEQ ID NO 133 and SEQ ID NO 135,
[0126] xxvii) SEQ ID NO 137 and SEQ ID NO 139,
[0127] xxviii) SEQ ID NO 137 and SEQ ID NO 141,
[0128] xxix) SEQ ID NO 144 and SEQ ID NO 147,
[0129] xxx) SEQ ID NO 150 and SEQ ID NO 153,
[0130] xxxi) SEQ ID NO 155 and SEQ ID NO 159,
[0131] xxxii) SEQ ID NO 155 and SEQ ID NO 161,
[0132] xxxiii) SEQ ID NO 157 and SEQ ID NO 159,
[0133] xxxiv) SEQ ID NO 157 and SEQ ID NO 161,
[0134] xxxv) SEQ ID NO 163 and SEQ ID NO 165,
[0135] xxxvi) SEQ ID NO 167 and SEQ ID NO 185,
[0136] xxxvii) SEQ ID NO 176 and SEQ ID NO 185,
[0137] xxxviii) SEQ ID NO 173 and SEQ ID NO 185,
[0138] xxxix) SEQ ID NO 176 and SEQ ID NO 185,
[0139] xl) SEQ ID NO 179 and SEQ ID NO 185,
[0140] xli) SEQ ID NO 182 and SEQ ID NO 185,
[0141] xlii) SEQ ID NO 187 and SEQ ID NO 185,
[0142] xliii) SEQ ID NO 190 and SEQ ID NO 185,
[0143] xliv) SEQ ID NO 193 and SEQ ID NO 185,
[0144] xlv) SEQ ID NO 196 and SEQ ID NO 185,
[0145] xlvi) SEQ ID NO 199 and SEQ ID NO 201,
[0146] xlvii) SEQ ID NO 205 and SEQ ID NO 201,
[0147] xlviii) SEQ ID NO 207 and SEQ ID NO 209,
[0148] xlix) SEQ ID NO 211 and SEQ ID NO 209,
[0149] l) SEQ ID NO 213 and SEQ ID NO 216,
[0150] li) SEQ ID NO 218 and SEQ ID NO 216,
[0151] lii) SEQ ID NO 221 and SEQ ID NO 223,
[0152] liii) SEQ ID NO 225 and SEQ ID NO 223,
[0153] liv) SEQ ID NO 228 and SEQ ID NO 230,
[0154] lv) SEQ ID NO 232 and SEQ ID NO 230,
[0155] lvi) SEQ ID NO 234 and SEQ ID NO 236,
[0156] lvii) SEQ ID NO 238 and SEQ ID NO 240,
[0157] lviii) SEQ ID NO 242 and SEQ ID NO 244,
[0158] lix) SEQ ID NO 246 and SEQ ID NO 249,
[0159] lx) SEQ ID NO 252 and SEQ ID NO 255, and
[0160] lxi) SEQ ID NO 258 and SEQ ID NO 255.

[0161] Preferably, the combination of genes is R3a (CC; AAW48299) and Avr3a_Phytophthora.

[0162] The following table gives further information about CC-NBS-LRR resistance genes from different crops and their corresponding Avr genes suitable to be used in the invention wherein the use as a combination of resistance gene and corresponding Avr gene is preferred: Table 1: List of CC-NBS-LRR resistance proteins with matching avirulence proteins.

TABLE 1
List of CC-NBS-LRR resistance proteins with matching avirulence proteins.

| Resistance proteins: | corresponding Avirulence proteins | | |
|---|---|---|---|
| Rpi-blb3 | Avr2_Phytophthora_infestans | | |
| SEQ ID NO 44 | SEQ ID NO 46 | | |
| (SEQ ID NO 45) | (SEQ ID NO 47) | | |
| R2 | Avr2_Phytophthora_infestans | | |
| SEQ ID NO 48 | SEQ ID NO 46 | | |
| (SEQ ID NO 49) | (SEQ ID NO 47) | | |
| Rpi-abpt | Avr2_Phytophthora_infestans | | |
| SEQ ID NO 50 | SEQ ID NO 46 | | |
| (SEQ ID NO 51) | (SEQ ID NO 47) | | |
| Rpi-edn1 | Avr2_Phytophthora_infestans | | |
| SEQ ID NO 52 | SEQ ID NO 46 | | |
| (SEQ ID NO 53) | (SEQ ID NO 47) | | |
| R1 | Avr1_Phytophthora_infestans | | |
| SEQ ID NO 54 | SEQ ID NO 57 | | |
| (SEQ ID NO 55) | (SEQ ID NO 58) | | |
| [SEQ ID NO 56] | | | |
| Rpi-blb2 | Avrblb2 | | |
| SEQ ID NO 59 | SEQ ID NO 62 | | |
| (SEQ ID NO 60) | (SEQ ID NO 63) | | |
| [SEQ ID NO 61] | | | |
| Rpi-blb1 | Avr-blb1 = Avr-sto1 | | |
| SEQ ID NO 64 | SEQ ID NO 67 | | |
| (SEQ ID NO 65) | (SEQ ID NO 68) | | |
| [SEQ ID NO 66] | | | |
| Rpi-pta1 | Avr-blb1 = Avr-sto1 | | |
| SEQ ID NO 69 | SEQ ID NO 67 | | |
| (SEQ ID NO 70) | (SEQ ID NO 68) | | |
| [SEQ ID NO 71] | | | |
| Rpi-sto1 | Avr-blb1 = Avr-sto1 | | |
| SEQ ID NO 72 | SEQ ID NO 67 | | |
| (SEQ ID NO 73) | (SEQ ID NO 68) | | |
| [SEQ ID NO 74] | | | |
| Rpi-vnt1.1 | Avr-vnt1 | | |
| SEQ ID NO 75 | (PITG_16294)_Phytophthora | | |
| (SEQ ID NO 76) | SEQ ID NO 77 | | |
| | (SEQ ID NO 78) | | |
| Rpi-edn2 | Avrblb2 | | |
| SEQ ID NO 79 | SEQ ID NO 81 | | |
| (SEQ ID NO 80) | (SEQ ID NO 82) | | |
| R9a | Avrblb2 | | |
| (SEQ ID NO 266) | SEQ ID NO 81 | | |
| | (SEQ ID NO 82) | | |
| R8 | Avr8_Phytophthora_infestans | | |
| SEQ ID NO 85 | SEQ ID NO 87 | | |
| (SEQ ID NO 86) | (SEQ ID NO 88) | | |
| Rpi-chc1 | PITG_16245 (Avr- | | |
| SEQ ID NO 89 | chc1)_Phytophthora | | |
| (SEQ ID NO 90) | SEQ ID NO 91 | | |
| | (SEQ ID NO 92) | | |
| R3a (CC; AAW48299) | Avr3a_Phytophthora | | |
| SEQ ID NO 93 | SEQ ID NO 95 | | |
| (SEQ ID NO 94) | (SEQ ID NO 96) | | |
| R3b (CC; AEC47890) | Avr3b | | |
| SEQ ID NO 97 | (PITG_18215)_Phytophthora | | |
| (SEQ ID NO 98) | SEQ ID NO 99 | | |
| | (SEQ ID NO 100) | | |
| Mla1_barley | Avra1_(AvrMla1)_Blumeria | | |
| SEQ ID NO 101 | SEQ ID NO 103 | | |
| (SEQ ID NO 102) | (SEQ ID NO 104) | | |
| Mla13_barley | Avra13_(AvrMla13)_Blumeria | | |
| SEQ ID NO 105 | SEQ ID NO 108 | | |
| (SEQ ID NO 106) | (SEQ ID NO 109) | | |
| [SEQ ID NO 107] | | | |
| Rpg1-b_Soybean | AvrB_Pseudomonas | | |
| SEQ ID NO 110 | SEQ ID NO 112 | | |
| (SEQ ID NO 111) | (SEQ ID NO 113) | | |
| RPM1 (CC; | | AvrRpm1 | AvrPpiA1_Pseudomonas |
| CAA61131) | | SEQ ID NO 114 | SEQ ID NO 116 |
| SEQ ID NO 118 | | (SEQ ID NO 115) | (SEQ ID NO 117) |
| (SEQ ID NO 119) | | | |
| RPS2 (CC; | AvrRpt2_Pseudomonas | | |
| AEE85156) | SEQ ID NO 122 | | |
| SEQ ID NO 120 | (SEQ ID NO 123) | | |
| (SEQ ID NO 121) | | | |
| RPS5 (CC; | AvrPphB (HopAR1)_Pseudomonas | | |
| AEE28852) | SEQ ID NO 126 | | |
| SEQ ID NO 124 | (SEQ ID NO 127) | | |
| (SEQ ID NO 125) | | | |
| B52 (CC; AAF09256) | AvrBs2_Xanthomonas | | |
| SEQ ID NO 128 | SEQ ID NO 130 | | |
| (SEQ ID NO 129) | (SEQ ID NO 131) | | |
| Rxo1 (AAX31149) | AvrRxo1 | | |
| SEQ ID NO 132 | SEQ ID NO 134 | | |
| (SEQ ID NO 133) | (SEQ ID NO 135) | | |
| I-2_tomato | Avr2 (SIX3)_Fusarium oxysporum | SIX5_Fusarium | |
| SEQ ID NO 136 | SEQ ID NO 138 | oxysporum | |
| (SEQ ID NO 137) | (SEQ ID NO 139) | SEQ ID NO 140 | |
| | | (SEQ ID NO 141) | |
| | | [SEQ ID NO 142] | |
| Pi-ta (AF207842) | AVR Pita (AF207841) | | |
| SEQ ID NO 143 | SEQ ID NO 146 | | |
| (SEQ ID NO 144) | (SEQ ID NO 147) | | |
| [SEQ ID NO 145] | [SEQ ID NO 148] | | |
| Piz-t (ABC73398) | AvrPiz-t (ACF39937) | | |
| SEQ ID NO 149 | SEQ ID NO 152 | | |
| (SEQ ID NO 150) | (SEQ ID NO 153) | | |
| (SEQ ID NO 151) | | | |
| Pia Rga4 (BAK39922) | AVR1-CO39 (AF463528_3) | | |
| SEQ ID NO 154 | SEQ ID NO 158 | | |
| (SEQ ID NO 155) | (SEQ ID NO 159) | | |
| Pia Rga5 (BAK39930) | AVR-Pia (BAH59484) | | |
| SEQ ID NO 156 | SEQ ID NO 160 | | |
| (SEQ ID NO 157) | (SEQ ID NO 161) | | |
| Pii-1 (BAN59294) | Avr-Pii (BAH59485) | | |
| SEQ ID NO 162 | SEQ ID NO 164 | | |
| (SEQ ID NO 163) | (SEQ ID NO 165) | | |
| Pik-1 (ADZ48537) | Avr Pik_km_kp allele D (allele | | |
| SEQ ID NO 166 | pex31-D) (BAH59486) | | |
| (SEQ ID NO 167) | SEQ ID NO 184 | | |
| Pik-2 (ADZ48538) | (SEQ ID NO 185) | | |
| SEQ ID NO 169 | Avr Pik_km_kp allele D (allele | | |
| (SEQ ID NO 170) | pex31-D) (BAH59486) | | |
| [SEQ ID NO 171] | SEQ ID NO 184 | | |
| Pikh-1 (AET36549) | (SEQ ID NO 185) | | |
| SEQ ID NO 172 | | | |
| (SEQ ID NO 173) | | | |
| [SEQ ID NO 174] | | | |
| Pikh-2 (AET36550) | | | |
| SEQ ID NO 175 | | | |
| (SEQ ID NO 176) | | | |
| [SEQ ID NO 177] | | | |
| Pikm1-TS | | | |
| (BAG71909) | | | |
| SEQ ID NO 178 | | | |
| (SEQ ID NO 179) | | | |
| [SEQ ID NO 180] | | | |
| Pikm2-TS | | | |
| (BAG71908) | | | |
| SEQ ID NO 181 | | | |
| (SEQ ID NO 182) | | | |
| [SEQ ID NO 183] | | | |
| Pikp-1 (ADV58352) | | | |
| SEQ ID NO 186 | | | |
| (SEQ ID NO 187) | | | |
| [SEQ ID NO 188] | | | |
| Pikp-2 (ADV58351) | | | |
| SEQ ID NO 189 | | | |
| (SEQ ID NO 190) | | | |
| [SEQ ID NO 191] | | | |
| Piks-1 (AET36547) | | | |
| SEQ ID NO 192 | | | |
| (SEQ ID NO 193) | | | |
| [SEQ ID NO 194] | | | |
| Piks-2 (AET36548) | | | |
| SEQ ID NO 195 | | | |
| (SEQ ID NO 196) | | | |
| [SEQ ID NO 197] | | | |
| Rps1k-l_soybean | Avr1k_Phytophthora sojae | Avr1b_Phyto- | |
| SEQ ID NO 198 | SEQ ID NO 200 | phthora sojae | |
| (SEQ ID NO 199) | (SEQ ID NO 201) | SEQ ID NO 202 | |
| Rps1k-2_soybean | | (SEQ ID NO 203) | |
| SEQ ID NO 204 | | | |
| (SEQ ID NO 205) | | | |
| L3 (CC; BAJ33559) | CP_Pepper mild mottle virus | | |
| SEQ ID NO 206 | (Avr L3&4) | | |
| (SEQ ID NO 207) | SEQ ID NO 208 | | |
| | (SEQ ID NO 209) | | |
| N′tobacco | CP_Pepper mild mottle virus | | |
| SEQ ID NO 210 | (Avr L3&4) | | |
| (SEQ ID NO 211) | SEQ ID NO 208 | | |
| | (SEQ ID NO 209) | | |
| RX1 (CC; CAB50786) | CP_Potato virus X | | |
| SEQ ID NO 212 | SEQ ID NO 215 | | |
| (SEQ ID NO 213) | (SEQ ID NO 216) | | |
| [SEQ ID NO 214] | | | |
| RX2 (CC; CAB56299) | | | |
| SEQ ID NO 217 | | | |
| (SEQ ID NO 218) | | | |
| [SEQ ID NO 219] | | | |
| Pvr4_pepper | Nlb_pepper mottle virus | | |
| SEQ ID NO 220 | (Avr Pvr4&9) | | |
| (SEQ ID NO 221) | SEQ ID NO 222 | | |
| Pvr9_pepper | (SEQ ID NO 223) | | |
| SEQ ID NO 224 | | | |
| (SEQ ID NO 225) | | | |
| [SEQ ID NO 226] | | | |
| Tm2_Tomato | 30kDa MP_Tobacco mosaic virus | | |
| SEQ ID NO 227 | (AvrTm2) | | |
| (SEQ ID NO 228) | SEQ ID NO 229 | | |
| Tm2\hat{ }2_Tomato | (SEQ ID NO 230) | | |
| SEQ ID NO 231 | | | |
| (SEQ ID NO 232) | | | |
| Tsw_pepper | NSs_Tomato spotted wilt virus | | |
| SEQ ID NO 233 | (AvrTsw) | | |
| (SEQ ID NO 234) | SEQ ID NO 235 | | |
| | (SEQ ID NO 236) | | |
| Sw-5b_tomato | NSm_Tomato spotted wilt virus | | |
| SEQ ID NO 237 | (AvrSw-5b) | | |
| (SEQ ID NO 238) | SEQ ID NO 239 | | |
| | (SEQ ID NO 240) | | |
| Rsv1_3gG2 | P3 cistron_soybean mosaic virus- | | |
| SEQ ID NO 241 | AvrRsv1_ 3gG2 | | |
| (SEQ ID NO 242) | SEQ ID NO 243 | | |
| | (SEQ ID NO 244) | | |
| Pm2 | AvrPm2 | | |
| SEQ ID NO 245 | SEQ ID NO 248 | | |
| (SEQ ID NO 246) | (SEQ ID NO 249) | | |
| [SEQ ID NO 247] | [SEQ ID NO 250] | | |
| PM3A (CC; | AvrPm3a2_f2 | | |
| AAY21626) | SEQ ID NO 254 | | |
| SEQ ID NO 251 | (SEQ ID NO 255) | | |
| (SEQ ID NO 252) | [SEQ ID NO 256] | | |
| [SEQ ID NO 253] | | | |
| PM3F | | | |
| SEQ ID NO 257 | | | |
| (SEQ ID NO 258) | | | |
| [SEQ ID NO 259] | | | |

[0163] Detailed sequence information is given in an additional listing. Not all known functional protein variants encoded by different alleles are listed. SEQ ID NO=nucleotide sequence as cDNA; (SEQ ID NO in curved brackets=amino acid sequence); [SEQ ID NO in square brackets=genomic sequence]

[0164] As is apparent from Tab. 1 for example the combination of resistance protein RPM1 (or the gene encoding the protein) with one of the avirulence proteins AvrB_Pseudomonas or AvrRpm1 or AvrPpiA1_Pseudomonas (or with the genes encoding these proteins) within a plant cell can trigger (directly or indirectly) a hyper sensitive immune response. Each of the genes can be modified as described elsewhere herein to reduce or decrease the decrease the cell death during the hypersensitive reaction.

[0165] The plant resistance protein and/or the avirulence protein of the present invention comprises at least one amino acid substitution compared to the respective wild type amino acid sequence, resulting in a reduction or decrease of cell death during a hypersensitive reaction.

[0166] In one embodiment the nucleic acid molecule according to the invention encodes an avirulence protein comprising at least one amino acid substitution selected from the group consisting of: K59/M82, R59/M82, H59/M82, C59/M82, N59/M82, Q59/M82, T59/M82, S59/M82, M59/M82, G59/M82, A59/M82, L59/M82, V59/M82, I59/M82 within the amino acid sequence of SEQ ID NO: 2. This means that the nucleic acid molecule encodes an avirulence protein comprising essentially the amino acid according to SEQ ID NO: 2 but that this sequence is modified by one or more of the above given amino acid substitutions. This avirulence protein may be the avirulence protein Avr3a wherein the avirulence protein optionally lacks a signal sequence.

[0167] It is also possible to use the native avirulence protein Avr3a including the signal sequence and substituting amino acids according to the following table:

TABLE 2
Avr3a variants comprising different substitutions according to the invention

| | SEQ ID NO | | |
|---|---|---|---|
| | Nucleic acid | | |
| | sequence | SEQ ID NO | Chemical property |
| | encoding the | Protein | of amino acid at |
| | protein | sequence | position 59 |
| K59/I82 | 1 | 2 | basic |
| K59/M82 | 4 | 5 | basic |
| R59/M82 | 6 | 7 | basic |
| H59/M82 | 8 | 9 | basic |
| D59/M82 | 10 | 11 | acidic |
| E59/M82 | 12 | 13 | acidic |
| F59/M82 | 14 | 15 | aromatic |
| Y59/M82 | 16 | 17 | aromatic |
| W59/M82 | 18 | 19 | aromatic |
| P59/M82 | 20 | 21 | non-polar |
| C59/M82 | 22 | 23 | polar |
| N59/M82 | 24 | 25 | polar |
| Q59/M82 | 26 | 27 | polar |
| T59/M82 | 28 | 29 | polar |
| S59/M82 | 30 | 31 | polar |
| M59/M82 | 32 | 33 | non-polar |
| G59/M82 | 34 | 35 | non-polar |
| A59/M82 | 36 | 37 | non-polar |
| L59/M82 | 38 | 39 | aliphatic |
| V59/M82 | 40 | 41 | aliphatic |
| I59/M82 | 42 | 43 | aliphatic |

[0168] Twenty Avr3aE59X/M82 variants and the native Avr3aK59/I82 allele are listed together with the corresponding substitution positions and SEQ ID NOs. Furthermore, the chemical property of the amino acid at position 59 is given.

[0169] In one embodiment the nucleic acid molecule according to the invention encodes a resistance protein comprising at least one amino acid substitution selected from the group consisting of: K35E, K37M, E61V, E61K, E135N and E136N within the amino acid sequence of SEQ ID NO: 269. This means that the nucleic acid molecule encodes a plant resistance protein comprising essentially the amino acid according to SEQ ID NO: 269 but that this sequence is modified by one or more of the above given amino acid substitutions. This resistance protein may be R3a.

[0170] Further provided is a polypeptide encoded by the nucleic acid molecule of the present invention. The polypeptide may be a plant resistance protein or an avirulence protein. The avirulence protein may be lacking the naturally occurring signal sequence which is responsible for the intracellular processing of the avirulence protein in the cell of the pathogen. An avirulence protein lacking the signal sequence is a protein that does not occur in nature. The invention does also encompass a combination of at least one resistance protein and at least one avirulence protein wherein at least one of the proteins comprises at least one amino acid substitution as described elsewhere herein. Potential combinations of resistance genes and avirulence genes are disclosed elsewhere herein. The invention does also encompass a solution comprising at least one protein or at least one combination of proteins according to the invention. The solution may be an aqueous solution and may comprise further compounds like a pH buffer and stabilizers. Part of the invention is also a method for the exterior or interior application of the solution to a plant or a plant part. The method comprises the steps of providing a plant or plant part and application of the solution to the outer or inner tissue of the plant or its part. The solution may be sprayed or injected.

[0171] Also provided is a vector or expression cassette comprising the nucleic acid molecule of the present invention. An example of a vector according to the invention is illustrated by FIG. 18. The illustrated vector includes coding sequences for the proteins R3a and Avr3a. The structure of these two proteins can be adapted by including amino acid substitutions as described herein. An example of an expression cassette is given by SEQ ID NO 270. Furthermore FIG. 19 gives an illustration of a suitable expression cassette.

[0172] The nucleic acid according to the invention encoding a resistance protein or an avirulence protein or both may be under control of a pathogen-inducible promoter or a promoter heterologous to the resistance protein or the avirulence protein or both. The pathogen-inducible promoter may be a synthetic pathogen-inducible promoter. Synthetic pathogen-inducible promoters are manmade and do not occur in nature.

[0173] The vector may be a plasmid, a cosmid, a phage or an expression vector, a transformation vector, shuttle vector or cloning vector, it may be double or single stranded, linear or circular, or it may be a prokaryotic or eukaryotic host, either by integration into its genome or transforming extrachromosomally. The vector may be heterologous to the resistance protein or the avirulence protein or both. Vectors are synthetic constructs which are manmade and which to not occur in nature. Preferably, the nucleotide sequence of the invention is operably linked in an expression vector to one or more regulatory sequences which allow transcription and optionally expression in a prokaryotic or eukaryotic host cell. As an example, the nucleotide sequence may be under the control of a suitable promoter or a terminator. Suitable promoters may be promoters which are constitutively induced (see, for example, the 35S promoter from the “cauliflower mosaic virus” (Odell et al. 1985)); particularly suitable promoters are those promoters which are pathogen-inducible (see, for example, the PR1 promoter from parsley (Rushton et al., 1996)). Particularly suitable pathogen-inducible promoters are synthetic or chimeric promoters which do not occur in nature, are composed of several elements and contain a minimum promoter as well as, upstream of the minimum promoter, at least one cis-regulatory element which act as the binding site for special transcription factors. Chimeric promoters are custom-designed and are induced by various factors or re-primed. Examples of such promoters can be found in WO2000/29592 and WO2007/147395. An example of a suitable terminator is the nos-terminator (Depicker et al., 1982).

[0174] Moreover, provided is a cell or host cell comprising the nucleic acid molecule, the polypeptide, or the vector or expression cassette of the present invention. Preferably, the cell comprises the nucleic acid molecule of the present invention as a transgene or as an endogene wherein the nucleic acid molecule being present as endogene is preferably a resistance protein. In this regard the invention also covers cells the genome of which has been modified to encode one or more substitutions according to the inventions in an encogene wherein the endogene encodes a resistance protein. The modifications may be achieved by the use of genome editing technologies as described elsewhere herein. Also encompassed is a plant comprising one or more of such cells or being regenerated from such cell.

[0175] The vector or expression cassette may, for example, be introduced into the (host) cell by conjugation, mobilization, biolistic transformation, agrobacterium-conferred transformation, transfection, transduction, vacuum infiltration or electroporation. Methods for vector introduction, as well as methods for the preparation of the vectors and expression cassettes, are familiar to the person skilled in the art (see, for example, Sambrook et al., Molecular Cloning, Cold Spring Harbor Laboratory, 3rd Ed., 2001).

[0176] In one embodiment, the host cell may be a prokaryotic cell, e.g., a bacterial cell. In another embodiment, the host cell may be a eukaryotic cell (e.g., a plant cell or a yeast cell). Particularly preferred bacterial host cells are Agrobacterium tumefaciens, A. rhizogenes, and E. coli.

[0177] Further provided is a plant or part thereof comprising the nucleic acid molecule of the present invention or comprising the cell of the present invention, and a plant or part thereof regenerated from said cell.

[0178] Also provided is a seed or offspring from the plant of the present invention, wherein the seed or the offspring comprises the nucleic acid molecule of the present invention as a transgene or an endogene.

[0179] An additional aspect of the invention is seed stock comprising seeds that contain the nucleic acid or acids according to the invention. The nucleic acid or acids according to the invention may be present transgenically or endogenously. The seed stock and the seeds may be technically treated. The invention thus also comprises technically-treated seed stock and technically-treated seeds. The various embodiments of technically-treated seed stock are explained in detail in the following whereby the term seed stock also includes seeds: Technically-treated seed stock may be present in polished form. The outermost layer of the seed is thereby removed, so that the seed assumes a more rounded form. This is helpful in sowing. An optimally uniform shape leads to a uniform distribution of the seed stock grains. Technically-treated seed stock furthermore encompasses pilled seed stock. The seed stock is thereby placed on a pilling mass that protects the seed stock contained therein and leads to a larger mass, such that the pilled seed stock shows a greater resistance capability with regard to wind drift and is thus less susceptible to being blown away by the wind, and, at the same time, a more precise positioning during sowing is enabled. In a preferred embodiment of the invention, all pilled seed stock grains of a batch or unit designated for sale have essentially the same shape and the same mass. Deviations of 5% in diameter and mass are possible. However, the deviations preferably do not exceed 1%. As one of the main components, the pilling mass may contain for example a mineral compound such as clay and/or peat, for example. Additional possible components are cited in U.S. Pat. No. 4,067,141. Moreover, the pilling mass may contain additional chemical agents that positively influence the cultivation in practice. These may here be substances that are counted among fertilizing agents. Furthermore, these may be fungicides, insecticides, and/or antifeedants. The fungicides may be thiram and/or hymexazol and/or other fungicides. The insecticide may be a substance from the neonicotinoid group. The substance from the neonicotinoid group is preferably imidacloprid (ATC Code: QP53AX17) and/or clothianidin (CAS number 210880-92-5). Furthermore, the insecticide may also be cyfluthrin (CAS number 68359-37-5) or beta-cyfluthrin.

[0180] The pilled seed stock is a specific embodiment of dressed seed stock. In this context technically-treated seed stock encompasses also the dressed seed stock. However, the invention is not limited to pilled seed stock, but, rather, may be applied with any form of dressed seed stock. The invention thus also relates to dressed seed stock, which includes pilled seed stock, but is not limited to this. Dry dressing, wet dressing, and suspension dressing are thus also encompassed. The dressing may thereby also contain at least one dye, such that the dressed seed stock may be quickly differentiated from undressed seed stock, and, furthermore, good visibility in the environment is ensured after sowing. The dressing may also contain those agrochemicals which are described in the context of the pilling mass. The invention includes thus such dressed seed stock whereby the dressing contains at least one antifeedant such as an insecticide and/or at least one fungicide. Optionally, so called electonical dressing (dressing by application of electric energy) may be applied. However, electronic dressing is not a dressing in the strict sense of the word.

[0181] An additional form of technically-treated seed stock is encrusted seed stock. What is known as coating is also spoken of in this context as well as of seed stock treated with a coating. The difference to pilled seed stock is that the seed grains retain their original shape, wherein this method is especially economical. The method is described in EP 0 334 258 A1, for example. An additional form of technically-treated seed stock is sprouted or primed seed stock. Sprouted seed stock is pretreated via a pre-germination, whereas primed seed stock has been pretreated via a priming (“germination”). Pre-germinated and primed seed stock have the advantage of a shorter emergence time. The point in time of the emergence after sowing is, at the same time, more strongly synchronized. This enables better agrotechnical processing during cultivation and especially during the harvest, and, additionally, increases the yield quantity. In pre-germination, the seed stock is germinated until the radicle exits the seed stock shell, and the process is subsequently stopped. In the priming, the process is stopped before the radicle exits the seed stock shell. Compared to pre-germinated seed stock, seed stock that has been subjected to a priming is insensitive to the stress of a re-drying and, after such a re-drying, has a longer storage life in comparison to pre-germinated seed stock, for which a re-drying is generally not advised. In this context, technically pre-treated seed stock also includes primed and re-dried seed stock. The process of pre-germination is explained in U.S. Pat. No. 4,905,411 A. Various embodiments of priming are explained in EP 0 686 340 A1. In addition to this, it is also possible to simultaneously pill and prime seed stock in one process. This method is described in EP 2 002 702 B1. Primed seed stock which is moreover pilled, is encompassed by the present invention.

[0182] The technically-treated seed stock may additionally be furnished with one or more of the herbicide resistances explained above. This allows a further-improved agrotechnical cultivation, since the technically-treated seed stock may be deployed on a field that has previously been treated with weed killer, and that therefore is weed-free.

[0183] In addition to this, the invention also encompasses a mixture containing the seed stock according to the invention or the seeds according to the invention, and a dressing mass as defined above. The dressing mass is thereby preferably embodied as a pilling mass, as defined above.

[0184] With storage of seed stock according to the invention, storage conditions are preferably to be chosen that do not negatively affect the stability or storage life of the seed stock. Fluctuations in humidity may, especially, have a disadvantageous effect here. Part of the invention is a method for the storage of the seed stock in a container that is via simultaneously water-repellent and breathable. Such a container may be designed as a carton. Such a carton may optionally possess an inner vapor barrier. If the carton is designed as a duplex carton, its stability increases. A seed stock according to the invention that includes such a container and such a carton, or technically-treated seed stock according to the invention, is likewise part of the invention. It is likewise part of the invention to contain seed stock according to the invention or technically-treated seed stock according to the invention in such a carton.

[0185] In one embodiment, the plant according to the invention is a hybrid plant or a double haploid plant. Hybrid plants and double haploid plants do not occur in nature and cannot be isolated from nature. In a further embodiment of the plant according to the invention, the nucleic acid molecule according to the invention is present in heterozygous or homozygous form. In the case of a hybrid plant, the nucleic acid molecule may also be present in hemizygous form. The invention also encompasses hybrid seeds and double haploid seeds which contain a nucleic acid according to the invention or a polypeptide according to the invention.

[0186] The term “transgene” (or “transgenic”) is understood to mean that the respective gene is an exogenous gene that was introduced into the plant. The exogenous gene may be derived from a species other than the plant species into which it is introduced. Alternatively, the respective gene may be a gene already present in the plant species into which it is introduced, so that one or more additional copies of said gene are present as a result introducing the transgene.

[0187] The present invention also provides a method for increasing a plant's resistance towards at least one plant pathogen. In one embodiment, said method comprises the steps of introducing the nucleic acid molecule of the present invention into the genome of at least one cell of a plant and regenerating a plant from that cell. This may be done via homology-directed repair or homologous recombination for example by the use of gene editing technology as stated elsewhere herein. Alternatively, said method comprises the steps of transforming a plant cell with a nucleic acid molecule of the present invention, or the vector or the expression cassette of the present invention, and regenerating a plant from that cell. The methods for increasing a plant's resistance towards at least one plant pathogen may further comprise the step of causing the expression of the nucleic acid molecule in the plant.

[0188] “Introducing” in the meaning of the present invention includes stable integration by means of transformation including Agrobacterium-mediated transformation, transfection, microinjection, biolistic bombardment, insertion using gene editing technology like CRISPR systems, TALENs, zinc finger nucleases or meganucleases, homologous recombination, modification of endogenous gene using random or targeted mutagenesis like TILLING or gene editing, introgression using breeder's methods, etc.

[0189] Moreover, the invention comprises a method for the production of a plant comprising a gene encoding a resistance protein wherein the resistance protein has a decreased or reduced induction of cell death or reduced cell death-inducing activity during a hypersensitive response comprising the following steps:

[0190] a) Providing a plant or cell thereof comprising an endogenes gene encoding a resistance protein

[0191] b) Modifying the coding sequence of the endogenes gene to encode one or two or three or more amino acid substitutions within the amino acid sequence of the resistance protein thereby encoding a resistance protein having a decreased or reduced induction of cell death or reduced cell death-inducing activity during a hypersensitive response

[0192] c) Optionally regenerating a plant of the cell

[0193] The modification may be achieved by the use of CRISPR systems, TALENs, zinc finger nucleases or meganucleases, homologous recombination, modification of endogenous gene using random or targeted mutagenesis like TILLING. The resistance gene may be one of the resistance genes given elsewhere herein and/or a resistance gene structurally defined by the disclosure of the sequence listing. The encoded amino acid substitution. The modification may encode an amino acid substitution as stated elsewhere herein. Especially the amino acid substitution may encode one of the amino acid substitutions as disclosed herein for the resistance gene R3a.

[0194] Furthermore, if the resistance genes belong to the class of CC_{DAE}-NBS-LRR resistance genes the amino acid substitution may be a substitution as defined herein in the context of the method for the modification of an R-gene belonging to the CC_{DAE}-NBS-LRR resistance gene class. The invention is also related to a plant obtainable by this method.

[0195] The regeneration of organisms out of cells is explained in various standard references of the cell related biology. The regeneration of plants is for example disclosed in the standard reference “Plant biotechnology: comprehensive biotechnology, second supplement” (Michael W. Fowler, Graham Warren, Murray Moo-Young—Pergamon Press—1992). An example concerning especially the regeneration of Beta vulgaris is given in Lindsey, K., and P. Gallois. “Transformation of sugarbeet (Beta vulgaris) by Agrobacterium tumefaciens.” Journal of experimental botany 41.5 (1990): 529-536.

[0196] As the invention is related to biological processes the exact effect may be dependend on the avirulence and/or resistance protein chosen, the substitutions included in the protein(s) and the plant species in which the invention is put into practice. For achieving the best possible results, it may be worth to test several avirulence and/or resistance proteins in a specific plant species and to test different substitutions or substitution combinations within the avirulence and/or resistance protein. Therefore, the invention also comprises a method for testing of resistance and/or avirulence having different substitutions in a plant comprising the following steps:

[0197] 1) Providing a plant

[0198] 2) Transforming the plant stably or transiently with

[0199] a) a nucleic acid sequences encoding at least two proteins wherein the proteins are resistance and/or avirulence proteins

[0200] b) at least two nucleic acid sequences each encoding a protein wherein the protein is a resistance and/or avirulence protein

[0201] wherein each protein comprises different substitutions according to the invention

[0202] 3) Assessing the resistance resulting from the transformation of one of the proteins under step 2)

[0203] 4) Optionally selecting the plant comprising the protein which comprises the substitution(s) which showed the best resistance or optionally selecting the protein which comprises the substitution(s) which showed the best resistance.

[0204] The assessment of the resistance can be done by infecting the plant with a pathogen and quantifying the amount of cell death and detecting the presence of a hypersensitive reaction. The pathogen to be used in the test is preferably a fungus and particularly preferably the pathogen from which the avirulence protein (if an avirulence protein has been tested) originates. The invention also relates to the protein which is selected or selectable by the testing method given above.

[0205] Further, the present invention provides a method for the identification of a plant comprising the nucleic acid molecule of the present invention, said method comprising the steps of isolating DNA from the plant of the present invention or part thereof, and performing a polymerase chain reaction using the isolated DNA as a template, thereby amplifying the nucleic acid molecule of the present invention or a part thereof. The method may further comprise the step of detecting the presence of the nucleic acid molecule or a part thereof and thereby identifying the plant. For this approach it is suitable to perform the polymerase chain reaction in the presence of at least one molecular marker which allows due to its chemical structure the differentiation of single nucleotide polymorphisms (SNPs).

[0206] The present invention further provides an oligonucleotide which may be used, for example, as a primer in the identification method of the present invention, wherein the oligonucleotide is able to hybridize to a nucleic acid molecule of the present invention. Preferably, the nucleotide sequence of the oligonucleotide is identical to a part of the nucleic acid molecule of the present invention and has a length of at least 15 nucleotides.

[0207] Furthermore, the oligonucleotide or molecular marker according to the invention may be connected to a fluorescent dye in order to generate a fluorescence signal, e.g., under excitation via light of the corresponding wavelength. The fluorescent dye may be fluorochrome. The oligonucleotides according to the invention may be coupled with other compounds that are suitable for generating a signal. Such oligonucleotides or molecular markers do not occur in nature and cannot be isolated from nature. The following is executed to produce such marked oligonucleotides: DNA may be marked bio-orthogonally. For this, DNA may be marked in vivo or in vitro with nucleoside analogs, which, for example, may subsequently be coupled with a fluorophore per Staudinger reaction. In addition to this, DNA may also be chemically provided with fluorophores. Oligonucleotides may be marked via a phosphoramidite synthesis with fluorophores that, for example, are used in QPCR, DNA sequencing, and in situ hybridization. Furthermore, DNA may be generated enzymatically in the course of a polymerase chain reaction with fluorescent nucleotides, or be marked with a ligase or a terminal deoxynucleotidyl transferase. DNA may also be detected indirectly via a biotinylation and fluorescent avidin. For couplings, fluorescein, fluorescent lanthanides, gold nanoparticles, carbon nanotubes, or quantum dots, among other things, are used as fluorophores. One of the most commonly used fluorescent substances is FAM (carboxyfluorescein). Consequently, oligonucleotides and, in particular, primers that possess a FAM marking are encompassed by the invention. FAM is preferably present as 6-FAM, wherein—depending upon the desired wavelength of the emission and excitation—other FAM variants, e.g., 5-FAM, may, however, also be used. Examples of additional fluorescence markers are AlexaFluor, ATTO, Dabcyl, HEX, Rox, TET, Texas Red, and Yakima Yellow. Depending upon the field of use, the oligonucleotides may be furnished with modifications of the bases or of the sugar phosphate spine. Among these are, among others, amino-dT, azide-dT, 2-aminopurine,5-Br-dC, 2′-deoxyinosine (INO), 3′-deoxy-A, C, G, 5-Met-dC, 5-OH-Met-dCN6-Met-dA, and others.

[0208] A kit comprising at least one of the oligonucleotide of the present invention is also provided. The kit may also contain a pair of the oligonucleotides of the present invention.

[0209] Furthermore, the present invention also relates to a marker chip (“DNA chip” or microarray) which contains at least one oligonucleotide according to the invention that is suitable for detection. The marker chip is suitable for application in one or more detection methods according to the invention.

[0210] Moreover, provided is a method for the reduction of plant pathogen infestation or the formation of necrotic lesions during the cultivation of plants, comprising the steps of (i) planting the plant or part thereof of the present invention, or the seed of the present invention in a cultivation area, and (ii) growing the plant or a germling resulting from the seed.

[0211] The nucleic acid according of the present invention may be used for conferring or increasing resistance towards at least one plant pathogen to a plant or a part thereof.

[0212] Furthermore, the present invention may be used to engineer any CC-NBS-LRR resistance gene and/or its corresponding avirulence gene using the promoter induced co-expression strategy for the development of pathogen-resistant plants. The technical application of the invention is not restricted to fungal disease but may also be used to develop plants resistant to insects, bacteria, nematodes and/or viruses if an appropriate pathogen-inducible promoter is selected. Suitable resistance proteins and corresponding avirulence proteins are listed in Tab. 1.

[0213] The present invention also comprises the use of a nucleic acid according to the invention for conferring or increasing resistance towards at least one plant pathogen to a plant or a part thereof.

[0214] The present invention also comprises an oligonucleotide for use as a primer in a method for the identification of a plant according to the present invention as described above, wherein the oligonucleotide is able to hybridize to a nucleic acid molecule according to the present invention. The nucleotide sequence of the oligonucleotide may be identical to a part of the nucleic acid molecule according to the invention and may have a length of at least 15 nucleotides.

[0215] Furthermore, the present invention is also related to a method for the modification of an R-gene belonging to the CC_{DAE}-NBS-LRR resistance gene class (FIG. 1). The method is suitable for the production of a gene encoding a modified resistance protein wherein the modified resistance protein leads to a reduced cell death in comparison to the resistance protein lacking the modification. The method comprises the following steps:

[0216] a) Providing a gene encoding an R-gene belonging to the CC_{DAE}-NBS-LRR resistance gene class

[0217] b) Modifying the nucleic acid sequence to generate an amino acid substitution selected from the group consisting of:

[0218] I) Substitution of a basic, positively charged amino acid by an acidic negatively charged amino acid or an aliphatic amino acid in the CC-domain of the protein

[0219] II) Substitution of D or E in the DAE motif by a basic, positively charged amino acid like K or R or by an aliphatic amino acid like V, I or L

[0220] III) Substitution of one of the two conserved acidic, negatively charged amino acids at the C-terminus of the CC-domain by a polar amino acid like N or Q.

[0221] Examples for acidic, negatively charged amino acids are for example aspartic acid (D) or glutamate (E). Examples for basic, positively charged amino acids are for example histidine, lysine or arginine.

[0222] In a preferred embodiment of this method the substitution is a substitution according to I) wherein the substitution is selected from: K30E, R31G and/or K119D within SEQ ID NO 263; K35E and/or K37M within SEQ ID NO 269 or the substitution is a substitution according to II) wherein the substitution is selected from: E61V and/or E61K within SEQ ID NO 269 or the substitution is a substitution according to III) wherein the substitution is selected from E135N and/or E136N within SEQ ID NO 269. The present invention is also related to a protein obtainable by this method. The substitution according to step b) may be done in vitro. Furthermore, it is possible to perform this step by gene editing approaches like TALENS, Zinc Finger Nucleases and CRISPR nuclease including Cas9, CasX, CasY or Cpf1 nuclease.

[0223] In a further aspect of this invention the following method is provided: A method for increasing a plant's resistance towards at least one plant pathogen comprising:
[0224] (i) integrating the nucleic acid molecule according to any one of claims 1 and 3-8 into the genome of at least one plant cell and regenerating a plant from that cell; or
[0225] (ii) transforming a plant cell with a nucleic acid molecule according to any one of claims 1 and 3-8, or the vector or the expression cassette according to claim 2, and regenerating a plant from that cell

[0226] wherein the nucleic acid molecule according to step (i) or (ii) encodes a resistance protein comprising the amino acid sequence according to SEQ ID NO 269 and/or an avirulence protein comprising the amino acid sequence according to SEQ ID NO 2 or according to SEQ ID NO 267. Optionally the plant cell according to step (i) or (ii) is the cell of a plant belonging to the family of Poaceae or Fabaceae.

### EXAMPLES

[0227] The following examples are provided for illustrative purposes only and are not construed as limiting the present invention.

### Example 1: Molecular Stack of R3a Resistance Gene and Avr3a^{KI} Avirulence Gene

[0228] A molecular stack of the native R3a resistance gene of potato and the Avr3a^{KI} gene was constructed (FIG. 19) and transformed into the potato cultivar “Russet Burbank”. The expression of the R3a gene was under control of the endogenous R3a promoter, and the Avr3a expression was controlled by the pathogen-inducible synthetic promoter 2xS-4xD-NpCABE which is comprised in SEQ ID NO 270. Transgenic R3a-Avr3a^{KI} lines were generated and transferred into the greenhouse as rooted in-vitro plants. First, the plantlets developed well in soil, showing no difference to the non-transgenic Russet Burbank. However, 3-4 weeks after transfer to the greenhouse, spontaneous necrosis of leaf tissue, abortion of leaves and stunted growth of the plants were observed.

TABLE 3
Infected potato leaves of T-047, T-036, T-029 and T-071 show
reduced sporangia production of P. infestans in comparison to
Russet Burbank but severe disturbance of plant development

| | Sporangia (%) | | | Sporangia (%) | Plant |
|---|---|---|---|---|---|
| | Test: | | | Mean of | phenotype |
| | 1 | 2 | 3 | 3 tests | |
| Russet | 100 | 100 | 100 | 100 ± 0 | normal |
| Burbank | | | | | |
| (control) | | | | | |
| T-047 | 61 | n.d. | n.d. | 61 | 30% size reduction |
| | | | | | Spontaneous leaf |
| | | | | | necrosis |
| T-036 | n.d. | 16* | 59 | 37 | 50% size reduction |
| | | | | | single leaf fall |
| T-029 | 21* | 11* | 43* | 25 | 50% size reduction |
| | | | | | single leaf fall |
| T-071 | n.d. | n.d. | n.d. | n.d. | 80% size reduction |
| | | | | | severe leaf fall |

[0229] The sporangia were washed off from the infected potato leaves (n=8) at 6 dpi and the sporangia numbers were determined by a particle counter. The number of sporangia of Russet Burbank was set to 100. In total 3 independent resistance assays were performed. Differences between samples were assessed by using analysis of variance (ANOVA). (*=Significant different according ANOVA to Russet Burbank p<0.05. n.d.=not determined.)

[0230] Four R3a-Avr3a^{KI} lines, which were analyzed in detail, showed a reproducible gradient of disintegration (FIG. 2). AqRT-PCR analysis revealed that the level of the negative phenotype of adult plants correlated with the expression of the Avr3a^{KI} gene. Expression of the Avr3a^{KI} gene was also detectable in healthy young plants, and the Avr3a expression was even higher than in adult plants (FIG. 2). This indicated that the resistance gene R3a is developmentally regulated and the resistance mechanism is not active in young plants.

[0231] Therefore, on the basis of these results it can be concluded that the direct transfer of the naturally occurring late blight resistance gene R3a from potato (lacking a substitution) and the naturally occurring Avr3aKI gene of Phytophthora infestans (lacking a substitution) under the control of a synthetic pathogen-inducible promoter leads to severe growth retardation and leaf damage of the plant even in the absence of the pathogen. During greenhouse cultivation, the pathogen-inducible promoter is activated by unknown developmental factors and the highly active Avr3aKI protein induces cell death. The results show that the approach of direct transfer is agronomically impractical.

### Example 2: Modification of R3a Gene Activity

[0232] In order to find a balanced level of gene expression, which does not harm the plant in the absence of the pathogen, mutagenized versions of the R3a gene were developed and successfully tested in a transient assay.

[0233] A comparison of the CC-domain of R3a with the CC_{DAE}-domains of the sugar beet R-genes BvKWS3_165 and Bv123 revealed that the DAE and EDVID motifs are conserved (FIG. 3). The R3a gene is therefore a member of the CC_{DAE}-NBS-LRR resistance gene class (FIG. 1). A loss-of function analysis of the CC_{DAE}-domain of the R-gene BvKWS3_165 according to SEQ ID NO 263 showed that the K30E, R31G, E96V, K119D, L153P modification, a D and E exchange in the DAE motif and the E143N and E144N modification of two conserved acidic amino acids at the C-terminus impaired the cell death inducing activity. Based on this knowledge, allelic R3a variants with reduced cell death inducing activity were generated in the CC_{DAE}-domain of the CC-NBS-LRR resistance gene.

[0234] As a first rule, the replacement of a basic, positively charged amino acid with an acidic, negatively charged amino acid or an aliphatic amino acid in the CC-domain impairs the HR-inducing activity, as shown for K30E, R31G and K119D of BvKWS_165 (compare to SEQ ID NO 263) (FIG. 4a). This rule was applied to reduce R3a activity by a K35E and K37M exchange in the R3a protein (compare to SEQ ID NO 265) (FIG. 4b).

[0235] As a second rule, the replacement of D or E in the DAE motif with a basic, positively charged amino acid (K, R) or an aliphatic amino acid (V, I, L) reduces R-gene activity, as shown by an E61V and E61K exchange for R3a (compare to SEQ ID NO 265) (FIG. 4b).

[0236] As a third rule, the replacement of one of the two conserved acidic, negatively charged amino acids at the C-terminus of the CC-domain with a polar amino acid (N, Q) reduces cell death, as shown for the E135N and E136N of R3a (compare to SEQ ID NO 265) (FIG. 4b).

[0237] These mutagenized versions can be used to generate co-expression lines without a detrimental phenotype.

### Example 3: Modification of Avr3a Activity

[0238] The Avr3a gene of P. infestans is essential for virulence (Bos et al., 2009). Among other existing alleles, two variants seem to have an outstanding function. They are present either as an Avr3a_K59I82 (Avr3a^{KI}) according to SEQ ID NO 1 or as an Avr3a_E59M82 (Avr3a^{EM}) allele according to SEQ ID NO 12 in all strains examined. The Avr3a^{KI} allele activates R3a resistance gene dependent innate immunity, whereas Avr3a^{E}M was not recognized by the R3a gene (Amstrong et al. 2005).

[0239] We tested the 20 Avr3a^{XM} (x=each of the 20 natural amino acids) alleles as given in Tab. 2 by ballistic transient assays in leaves of potato expressing the R3a gene. Fourteen alleles—Avr3a^{HM} Avr3a^{KM}, Avr3a^{RM}, Avr3a^{CM}, Avr3a^{NM}, Avr3a^{PM}, Avr3a^{QM}, Avr3a^{TM}, Avr3a^{AM}, Avr3a^{GM} Avr3a^{M}, Avr3a^{EM}, Avr3a^{MM}, Avr3a^{VM}—showed statistically significant cell death induction compared to the vector control (FIGS. 5-8). Twelve of these alleles—Avr3a^{HM}, Avr3a^{CM} Avr3a^{NM}, Avr3a^{PM} Avr3a^{QM}, Avr3a^{T}M, Avr3a^{AM}, Avr3a^{GM}, Avr3a^{IM}, Avr3a^{EM}, Avr3a^{MM}, Avr3a^{VM}—induced statistically significant less cell death compared to the avirulent Avr3a^{KI} allele (FIGS. 5-8). This result showed that Avr3a alleles were identified which trigger less cell death in potato than the avirulent allele Avr3a^{KI}, and that these alleles differ in the level of cell death induction.

[0240] The sequences given in Table 2 were tested in potato leaves (FIG. 9). The alleles Avr3a, Avr3a^{KM} Avr3a^{RM} triggered a strong cell death in potato, whereas the alleles Avr3a^{DM}, Avr3a^{FM} Avr3a^{YM} and Avr3a^{WM} were not recognized by R3a. However, other alleles (like Avr3a^{HM} Avr3a^{CM}, Avr3a^{NM}, Avr3a^{PM} Avr3a^{SM}, Avr3a^{T}M, Avr3a^{AM}, Avr3a, Avr3a^{LM}, Avr3a^{MM} and Avr3a^{VM}) induced surprisingly low cell death in potato, and the alleles Avr3a^{PM} and Avr3a^{GM} revealed a surprisingly strong cell death induction.

### Example 4: Enhanced Late Blight Resistance

[0241] We selected three gain-of-function mutants with moderate level of cell-death inducing activity. Compared to the avirulent allele Avr3a^{KI} (94% cell death), the cell death inducing activity of Avr3a^{IM}, Avr3a^{LM} and Avr3a^{GM} was 41%, 40% and 42%, respectively. The three AVR3a alleles were each combined with the synthetic 2xS-4xD-NpCABE promoter. The promoter-Avr3a cassettes were transformed into the potato cultivar Hermes, which contained the corresponding R3a resistance gene.

[0242] Eight independent transgenic potato lines of each modified Avr3a gene were transferred twice to the greenhouse. The lines were analyzed for a change of the phenotype and fungal resistance. With the exception of two lines, all lines showed the same vegetative growth phenotype as Hermes. One Avr3a^{IM} line showed some growth retardation and the leaves of one Avr3a^{LM} line revealed some micro-necrotic lesions. However, also these plants were viable. A negative phenotype was not detectable for lines were Avr3a^{GM} was present (FIG. 10).

[0243] Both sets of plants were tested several times for late blight resistance in a detached leaf assay (DLA). The fungal resistance was determined by a visual scoring of symptoms (5 dpi) and the measurement of sporangia produced in the lesions (6 dpi). Especially the sporangia production is important with respect to the epidemiology of P. infestans. The highest level of resistance improvement was observed for the line Avr3a^{GM}-T-024. This line showed a visible reduction of disease symptoms (FIG. 11a+11b) and only 40% sporangia production compared to the non-transgenic cultivar Hermes and a transgenic control in 5 independent resistance assays with two different sets of plants (Table 4). The line Avr3a^{GM}-T-014 and the line Avr3a^{IM}-T-112 also showed enhanced late blight resistance, as determined by 66% and 71% sporangia production (Table 4). No reproducible resistance improvement without a negative phenotype was detected for the Avr3a^{LM} lines. This result indicates that a reduction of cell-death inducing activity of the Avr gene is a promising strategy to circumvent the detrimental effects of uncontrolled R-Avr gene expression. The maximal possible level of resistance improvement is not known since the analysis was confined to 8 randomly selected lines.

TABLE 4
Infected potato leaves of Avr3a^{IM}-T-112, Avr3a^{GM}-T-014 and
Avr3a^{GM}-T-024 show reduced sporangia production of P. infestans
in comparison to Hermes and a transgenic control (RNAi-GFP).

| | Plant set 1 | | | Plant set 1 | | | Plant set 2 |
|---|---|---|---|---|---|---|---|
| | Sporangia (%) | | | Sporangia (%) | Plant set 2 | | Sporangia (%) |
| | Test: | | | Mean of | Sporangia (%) | | Mean of |
| | 1 | 2 | 3 | 3 tests | Test 1 | Test 2 | 2 tests |
| Hermes (control) | 100 | 100 | 100 | 100 ± 0 | 100 | 100 | 100 ± 0 |
| RNAi-GFP (transgenic control) | n.d. | n.d. | n.d. | n.d. | 102 | 112 | 107 ± 5 |
| Avr3a^{IM}-T-097 | 22 | 89 | 71 | 61 ± 28 | 105 | 86 | 95 ± 10 |
| Avr3a^{IM}-T-112 | 30 | 59 | 96 | 62 ± 27 | 91 | 62 | 76 ± 15 |
| Avr3a^{GM}-T-014 | 26 | 65 | 77 | 56 ± 22 | 87 | 26* | 76 ± 31 |
| Avr3a^{GM}-T-024 | 25 | 31* | 63* | 40 ± 17 | 54 | 28* | 41 ± 13 |
| Avr3a^{LM}-T-013 | 44 | 39 | 81 | 52 ± 19 | 88 | 130 | 109 ± 21 |
| Avr3a^{LM}-T-082 | 96 | 153 | | 126 ± 29 | 159 | 82 | 120 ± 39 |

[0244] The sporangia were washed off from the infected potato leaves (n=8) at 6 dpi and the sporangia numbers were determined by a particle counter. The number of sporangia of Hermes was set to 100. In total 5 independent resistance assays were performed with 2 different sets of plants. The black highlighted line Avr3a^{GM}-T-024 showed the highest level of sporangia reduction in all 5 assays. Differences between samples were assessed by using analysis of variance (ANOVA). (*=Significant different according ANOVA to Hermes p<0.05. n.d.=not determined.)

### Example 5: Avr3a Gene Expression Correlates with Resistance

[0245] The expression of the recombinant Avr3a gene of 6 transgenic lines and Hermes was measured by qRT-PCR analysis using the primers S53169 according to SEQ ID NO 278 and S3170 according to SEQ ID NO 279. Avr3a expression was normalized against the expression of the potato gene StMCB7 using the primers S1494 according to SEQ ID NO 280 and S1495 according to SEQ ID NO 281. Leaves were infected by P. infestans as described for the DLA, and RNA was extracted from inoculated and control leaves 0, 1, 2, 3 and 4 days after inoculation (dpi). The expression analysis showed a correlation between Avr3a gene expression and resistance improvement. The strongest Avr3a expression could be detected for the resistant line Avr3a^{GM}T024. The absolute expression of the Avr3a^{GM} gene in the resistant line was superior to the other lines at 2, 3 and 4 dpi (FIGS. 12a and 12b). Avr3 agene expression was nearly undetectable for line Avr3a^{LM}-T-082, which did not show resistance improvement in any assay.

### Example 6: Modification of Avr3a Gene Increases Threshold for Cell Death Induction

[0246] The transgenic lines T-047, T-036, T-029 and T-071, which were transformed with the R3a-Avr3a^{KI} genes, showed leaf abortion and different stunted growth in the greenhouse dependent on the Avr3a^{KI} expression level (FIG. 2). Expression analysis by qRT-PCR showed that even the lowest detected Avr3a^{KI} gene expression of 1.8 relative units in leaves of T-047 triggers spontaneous cell death in the absence of a pathogen.

[0247] The late blight resistant line Avr3a^{GM}-T-024 showed a background expression level of 146.5 relative units in the absence of a pathogen without any detrimental effect for the vegetative growth (FIGS. 10, 12a, 12b). These results demonstrated that the threshold for cell death induction was at least 100-fold increased by application of the modified Avr3a^{GM} gene (FIG. 13).

### Example 7: Enhanced Early Blight Resistance

[0248] The potato cultivar Hermes is very susceptible to Alternaria solani, the causal agent of early blight, as observed in field trials in the USA. Adult plants of both plant sets also showed early blight symptoms under greenhouse conditions. In both experiments, the late blight resistant line Avr3a^{GM}-T-024 revealed enhanced early blight resistance. Finally, an early blight disease scoring was made for the 2^{nd} plant set. Avr3a^{GM}-T-024 showed only 40% disease symptoms compared to Hermes and the transgenic control, which had been transformed with an RNAi construct directed against the GFP gene (FIG. 14a+14b).

### Example 8: Induction of Innate Immunity in Corn, Soybean and Wheat by R3a and Avr3a

[0249] The activity of resistance genes is confined to the members of a plant family, a phenomenon called “restricted taxonomic functionality”. In transient assays, the R3a-Avr3a^{KI} gene combination was tested for cell-death inducing activity in other non-solanaceous crops. After ballistic transformation into leaves of corn, soybean and wheat, a strong induction of cell death was unexpectedly detected as a hallmark of innate immunity (FIG. 15a, 15b, 15c). Other resistance genes of potato and their matching Avr genes (R1-Avr1, Rx1-potato virus X coat protein) did not induce cell death (FIGS. 16a, 16b, 16c and 17a, 17b and 17c). This means that the developed technology can also be transferred to other crops for the generation of broad pathogen resistance.

### CITED DOCUMENTS

[0250] Armstrong, M. R., Whisson, S. C., Pritchard, L., Bos, J. I., Venter, E., Avrova, A. O., . . . & Hamlin, N. (2005). An ancestral oomycete locus contains late blight avirulence gene Avr3a, encoding a protein that is recognized in the host cytoplasm. Proceedings of the National Academy of Sciences of the United States of America, 102(21), 7766-7771.
[0251] Ayliffe, M. A., & Lagudah, E. S. (2004). Molecular genetics of disease resistance in cereals. Annals of Botany, 94(6), 765-773.
[0252] Bos, J. I., Armstrong, M. R., Gilroy, E. M., Boevink, P. C., Hein, I., Taylor, R. M., . . . & Dixelius, C. (2010). Phytophthora infestans effector AVR3a is essential for virulence and manipulates plant immunity by stabilizing host E3 ligase CMPG1. Proceedings of the National Academy of Sciences, 107(21), 9909-9914.
[0253] Bourras, S., McNally, K. E., Ben-David, R., Parlange, F., Roffler, S., Praz, C. R., . . . & Schaefer, L. K. (2015). Multiple avirulence loci and allele-specific effector recognition control the Pm3 race-specific resistance of wheat to powdery mildew. The Plant Cell, 27(10), 2991-3012.
[0254] Brutus, A., Sicilia, F., Macone, A., Cervone, F., & De Lorenzo, G. (2010). A domain swap approach reveals a role of the plant wall-associated kinase 1 (WAK1) as a receptor of oligogalacturonides. Proceedings of the National Academy of Sciences, 107(20), 9452-9457.
[0255] Césari, S., Kanzaki, H., Fujiwara, T., Bernoux, M., Chalvon, V., Kawano, Y., . . . & Kroj, T. (2014). The NB-LRR proteins RGA4 and RGA5 interact functionally and physically to confer disease resistance. The EMBO journal, 33(17), 1941-1959.
[0256] Cesari, S., Moore, J., Chen, C., Webb, D., Periyannan, S., Mago, R., . . . & Dodds, P. N. (2016). Cytosolic activation of cell death and stem rust resistance by cereal MLA-family CC-NLR proteins. Proceedings of the National Academy of Sciences, 113(36), 10204-10209.
[0257] Chaparro-Garcia, A., Schwizer, S., Sklenar, J., Yoshida, K., Petre, B., Bos, J. I., . . . & Kamoun, S. (2015). Phytophthora infestans RXLR-WY effector AVR3a associates with dynamin-related protein 2 required for endocytosis of the plant pattern recognition receptor FLS2. PLoS One, 10(9), e0137071.
[0258] Collier, S. M., & Moffett, P. (2009). NB-LRRs work a “bait and switch” on pathogens. Trends in plant science, 14(10), 521-529.
[0259] Collier, S. M., Hamel, L. P., & Moffett, P. (2011). Cell death mediated by the N-terminal domains of a unique and highly conserved class of NB-LRR protein. Molecular plant-microbe interactions, 24(8), 918-931.
[0260] Dangl, J. L., Horvath, D. M., & Staskawicz, B. J. (2013). Pivoting the plant immune system from dissection to deployment. Science, 341(6147), 746-751.
[0261] Dangl, J. L., & Jones, J. D. (2001). Plant pathogens and integrated defence responses to infection. nature, 411(6839), 826.
[0262] Depicker, A., Stachel, S., Dhaese, P., Zambryski, P., & Goodman, H. M. (1982). Nopaline synthase: transcript mapping and DNA sequence. Journal of molecular and applied genetics, 1(6), 561-573.
[0263] Fradin, E. F., Abd-El-Haliem, A., Masini, L., van den Berg, G. C., Joosten, M. H., & Thomma, B. P. (2011). Interfamily transfer of tomato Ve1 mediates Verticillium resistance in Arabidopsis. Plant physiology, 156(4), 2255-2265.
[0264] Gaudet, R. G., & Gray-Owen, S. D. (2016). Heptose sounds the alarm: Innate sensing of a bacterial sugar stimulates immunity. PLoS pathogens, 12(9), e1005807.
[0265] Huang, S., Van Der Vossen, E. A., Kuang, H., Vleeshouwers, V. G., Zhang, N., Borm, T. J., . . . & Visser, R. G. (2005). Comparative genomics enabled the isolation of the R3a late blight resistance gene in potato. The Plant Journal, 42(2), 251-261.
[0266] Jones, J. D., & Dangl, J. L. (2006). The plant immune system. Nature, 444(7117), 323.
[0267] Joosten, M. H., & de Wit, P. J. (1999). The Tomato—Cladosporium Fulvum Interaction: A Versatile Experimental System to Study Plant-Pathogen Interactions. Annual review of phytopathology, 37(1), 335-367.
[0268] Lindsey, K., & Gallois, P. (1990). Transformation of sugarbeet (Beta vulgaris) by Agrobacterium tumefaciens. Journal of experimental botany, 41(5), 529-536.
[0269] Lu, X., Kracher, B., Saur, I. M., Bauer, S., Ellwood, S. R., Wise, R., . . . & Schulze-Lefert, P. (2016). Allelic barley MLA immune receptors recognize sequence-unrelated avirulence effectors of the powdery mildew pathogen. Proceedings of the National Academy of Sciences, 113(42), E6486-E6495.
[0270] Macho, A. P., & Zipfel, C. (2014). Plant PRRs and the activation of innate immune signaling. Molecular cell, 54(2), 263-272.
[0271] Martini, N., Egen, M., Rintz, I., & Strittmatter, G. (1993). Promoter sequences of a potato pathogenesis-related gene mediate transcriptional activation selectively upon fungal infection. Molecular and General Genetics MGG, 236(2-3), 179-186.
[0272] McHale, L., Tan, X., Koehl, P., & Michelmore, R. W. (2006). Plant NBS-LRR proteins: adaptable guards. Genome biology, 7(4), 212.
[0273] Narusaka, M., Kubo, Y., Hatakeyama, K., Imamura, J., Ezura, H., Nanasato, Y., . . . & Narusaka, Y. (2013). Interfamily transfer of dual NB-LRR genes confers resistance to multiple pathogens. PLoS One, 8(2), e55954.
[0274] Niemeyer, J., Ruhe, J., Machens, F., & Hehl, R. (2013). Differential expression of the TMV resistance gene N prevents a hypersensitive response in seeds and during germination. Planta, 237(3), 909-915.
[0275] Odell, J. T., Nagy, F., & Chua, N. H. (1985). Identification of DNA sequences required for activity of the cauliflower mosaic virus 35S promoter. Nature, 313(6005), 810.
[0276] Rairdan, G. J., Collier, S. M., Sacco, M. A., Baldwin, T. T., Boettrich, T., & Moffett, P. (2008). The coiled-coil and nucleotide binding domains of the potato Rx disease resistance protein function in pathogen recognition and signaling. The Plant Cell, 20(3), 739-751.
[0277] Rushton, P. J., Torres, J. T., Parniske, M., Wernert, P., Hahlbrock, K., & Somssich, I. E. (1996). Interaction of elicitor-induced DNA-binding proteins with elicitor response elements in the promoters of parsley PR1 genes. The EMBO journal, 15(20), 5690-5700.
[0278] Sambrook, J., & Russell, D. W. (2001). Molecular cloning: a laboratory manual 3rd edition. Coldspring-Harbour Laboratory Press, UK.
[0279] Strittmatter, G., Gheysen, G., Gianinazzi-Pearson, V., Hahn, K., Niebel, A., Rohde, W., & Tacke, E. (1996). Infections with various types of organisms stimulate transcription from a short promoter fragment of the potato gst1 gene. MPMI-Molecular Plant Microbe Interactions, 9(1), 68-73.
[0280] Takken, F. L., Albrecht, M., & Tameling, W. I. (2006). Resistance proteins: molecular switches of plant defence. Current opinion in plant biology, 9(4), 383-390.
[0281] Warren, G. S. (1992). Plant biotechnology: comprehensive biotechnology. Second supplement/volume editor, Michael W. Fowler & Graham S. Warren; editor-in-chief, Murray Moo-Young.
[0282] de Wit, P. J. (1992). Molecular characterization of gene-for-gene systems in plant-fungus interactions and the application of avirulence genes in control of plant pathogens. Annual review of phytopathology, 30(1), 391-418.

The application's sequence listing, which the Patent Office published only in electronic form, follows.

SEQUENCE LISTING (283 sequences)

SEQ ID NO: 1 - DNA, 381 bp, Artificial Sequence
  cDNA
atggaccaaaccaaggtcctggtgtatgggacgccagctcactacatacacgattcagccggcagaagacttcttcgcaagaacgaagagaatgaagaaacgtctgaggagcgagccccaaatttcaatttggcgaatctaaatgaggagatgtttaatgtggctgcgttgacgaagagagcagatgccaaaaagctagcgaaacagcttatgggtaatgataagctggcggatgctgcatacatttggtggcagcacaacagggttacgctagaccagattgacacgttcctgaagcttgcaagccgcaagacgcaaggcgcaaagtacaatcagatctacaatagctacatgatgcacctggggctcactggatattaa

SEQ ID NO: 2 - protein, 126 aa, Artificial Sequence
  Avr3a-KI without signal sequence
MDQTKVLVYGTPAHYIHDSAGRRLLRKNEENEETSEERAPNFNLANLNEEMFNVAALTKRADAKKLAKQLMGNDKLADAAYIWWQHNRVTLDQIDTFLKLASRKTQGAKYNQIYNSYMMHLGLTGY

SEQ ID NO: 3 - DNA, 444 bp, Artificial Sequence
  cDNA
  transit_peptide 4..66
atgcgtctggcaattatgctgtctgctacggctgtcgccataaactttgcaaccagcagtgcaatcgaccaaaccaaggtcctggtgtatgggacgccagctcactacatacacgattcagccggcagaagacttcttcgcaagaacgaagagaatgaagaaacgtctgaggagcgagccccaaatttcaatttggcgaatctaaatgaggagatgtttaatgtggctgcgttgacgaagagagcagatgccaaaaagctagcgaaacagcttatgggtaatgataagctggcggatgctgcatacatttggtggcagcacaacagggttacgctagaccagattgacacgttcctgaagcttgcaagccgcaagacgcaaggcgcaaagtacaatcagatctacaatagctacatgatgcacctggggctcactggatattag

SEQ ID NO: 4 - DNA, 381 bp, Artificial Sequence
  cDNA
atggaccaaaccaaggtcctggtgtatgggacgccagctcactacatacacgattcagccggcagaagacttcttcgcaagaacgaagagaatgaagaaacgtctgaggagcgagccccaaatttcaatttggcgaatctaaatgaggagatgtttaatgtggctgcgttgacgaagagagcagatgccaaaaagctagcgaaacagcttatgggtaatgataagctggcggatgctgcatacatgtggtggcagcacaacagggttacgctagaccagattgacacgttcctgaagcttgcaagccgcaagacgcaaggcgcaaagtacaatcagatctacaatagctacatgatgcacctggggctcactggatattaa

SEQ ID NO: 5 - protein, 126 aa, Artificial Sequence
  Avr3a-KM without signal sequence
MDQTKVLVYGTPAHYIHDSAGRRLLRKNEENEETSEERAPNFNLANLNEEMFNVAALTKRADAKKLAKQLMGNDKLADAAYMWWQHNRVTLDQIDTFLKLASRKTQGAKYNQIYNSYMMHLGLTGY

SEQ ID NO: 6 - DNA, 381 bp, Artificial Sequence
  cDNA
atggaccaaaccaaggtcctggtgtatgggacgccagctcactacatacacgattcagccggcagaagacttcttcgcaagaacgaagagaatgaagaaacgtctgaggagcgagccccaaatttcaatttggcgaatctaaatgaggagatgtttaatgtggctgcgttgacgagaagagcagatgccaaaaagctagcgaaacagcttatgggtaatgataagctggcggatgctgcatacatgtggtggcagcacaacagggttacgctagaccagattgacacgttcctgaagcttgcaagccgcaagacgcaaggcgcaaagtacaatcagatctacaatagctacatgatgcacctggggctcactggatattaa

SEQ ID NO: 7 - protein, 126 aa, Artificial Sequence
  Avr3a-RM without signal sequence
MDQTKVLVYGTPAHYIHDSAGRRLLRKNEENEETSEERAPNFNLANLNEEMFNVAALTRRADAKKLAKQLMGNDKLADAAYMWWQHNRVTLDQIDTFLKLASRKTQGAKYNQIYNSYMMHLGLTGY

SEQ ID NO: 8 - DNA, 381 bp, Artificial Sequence
  cDNA
atggaccaaaccaaggtcctggtgtatgggacgccagctcactacatacacgattcagccggcagaagacttcttcgcaagaacgaagagaatgaagaaacgtctgaggagcgagccccaaatttcaatttggcgaatctaaatgaggagatgtttaatgtggctgcgttgacgcacagagcagatgccaaaaagctagcgaaacagcttatgggtaatgataagctggcggatgctgcatacatgtggtggcagcacaacagggttacgctagaccagattgacacgttcctgaagcttgcaagccgcaagacgcaaggcgcaaagtacaatcagatctacaatagctacatgatgcacctggggctcactggatattaa

SEQ ID NO: 9 - protein, 126 aa, Artificial Sequence
  Avr3a-HM without signal sequence
MDQTKVLVYGTPAHYIHDSAGRRLLRKNEENEETSEERAPNFNLANLNEEMFNVAALTHRADAKKLAKQLMGNDKLADAAYMWWQHNRVTLDQIDTFLKLASRKTQGAKYNQIYNSYMMHLGLTGY

SEQ ID NO: 10 - DNA, 381 bp, Artificial Sequence
  cDNA
atggaccaaaccaaggtcctggtgtatgggacgccagctcactacatacacgattcagccggcagaagacttcttcgcaagaacgaagagaatgaagaaacgtctgaggagcgagccccaaatttcaatttggcgaatctaaatgaggagatgtttaatgtggctgcgttgacggatagagcagatgccaaaaagctagcgaaacagcttatgggtaatgataagctggcggatgctgcatacatgtggtggcagcacaacagggttacgctagaccagattgacacgttcctgaagcttgcaagccgcaagacgcaaggcgcaaagtacaatcagatctacaatagctacatgatgcacctggggctcactggatattaa

SEQ ID NO: 11 - protein, 126 aa, Artificial Sequence
  Avr3a-DM without signal sequence
MDQTKVLVYGTPAHYIHDSAGRRLLRKNEENEETSEERAPNFNLANLNEEMFNVAALTDRADAKKLAKQLMGNDKLADAAYMWWQHNRVTLDQIDTFLKLASRKTQGAKYNQIYNSYMMHLGLTGY

SEQ ID NO: 12 - DNA, 381 bp, Artificial Sequence
  cDNA
atggaccaaaccaaggtcctggtgtatgggacgccagctcactacatacacgattcagccggcagaagacttcttcgcaagaacgaagagaatgaagaaacgtctgaggagcgagccccaaatttcaatttggcgaatctaaatgaggagatgtttaatgtggctgcgttgacggagagagcagatgccaaaaagctagcgaaacagcttatgggtaatgataagctggcggatgctgcatacatgtggtggcagcacaacagggttacgctagaccagattgacacgttcctgaagcttgcaagccgcaagacgcaaggcgcaaagtacaatcagatctacaatagctacatgatgcacctggggctcactggatattaa

SEQ ID NO: 13 - protein, 126 aa, Artificial Sequence
  Avr3a-EM ohne Signalsequenz
MDQTKVLVYGTPAHYIHDSAGRRLLRKNEENEETSEERAPNFNLANLNEEMFNVAALTERADAKKLAKQLMGNDKLADAAYMWWQHNRVTLDQIDTFLKLASRKTQGAKYNQIYNSYMMHLGLTGY

SEQ ID NO: 14 - DNA, 381 bp, Artificial Sequence
  cDNA
atggaccaaaccaaggtcctggtgtatgggacgccagctcactacatacacgattcagccggcagaagacttcttcgcaagaacgaagagaatgaagaaacgtctgaggagcgagccccaaatttcaatttggcgaatctaaatgaggagatgtttaatgtggctgcgttgacgttcagagcagatgccaaaaagctagcgaaacagcttatgggtaatgataagctggcggatgctgcatacatgtggtggcagcacaacagggttacgctagaccagattgacacgttcctgaagcttgcaagccgcaagacgcaaggcgcaaagtacaatcagatctacaatagctacatgatgcacctggggctcactggatattaa

SEQ ID NO: 15 - protein, 126 aa, Artificial Sequence
  Avr3a-FM without signal sequence
MDQTKVLVYGTPAHYIHDSAGRRLLRKNEENEETSEERAPNFNLANLNEEMFNVAALTFRADAKKLAKQLMGNDKLADAAYMWWQHNRVTLDQIDTFLKLASRKTQGAKYNQIYNSYMMHLGLTGY

SEQ ID NO: 16 - DNA, 381 bp, Artificial Sequence
  cDNA
atggaccaaaccaaggtcctggtgtatgggacgccagctcactacatacacgattcagccggcagaagacttcttcgcaagaacgaagagaatgaagaaacgtctgaggagcgagccccaaatttcaatttggcgaatctaaatgaggagatgtttaatgtggctgcgttgacgtacagagcagatgccaaaaagctagcgaaacagcttatgggtaatgataagctggcggatgctgcatacatgtggtggcagcacaacagggttacgctagaccagattgacacgttcctgaagcttgcaagccgcaagacgcaaggcgcaaagtacaatcagatctacaatagctacatgatgcacctggggctcactggatattaa

SEQ ID NO: 17 - protein, 126 aa, Artificial Sequence
  Avr3a-YM without signal sequence
MDQTKVLVYGTPAHYIHDSAGRRLLRKNEENEETSEERAPNFNLANLNEEMFNVAALTYRADAKKLAKQLMGNDKLADAAYMWWQHNRVTLDQIDTFLKLASRKTQGAKYNQIYNSYMMHLGLTGY

SEQ ID NO: 18 - DNA, 381 bp, Artificial Sequence
  cDNA
atggaccaaaccaaggtcctggtgtatgggacgccagctcactacatacacgattcagccggcagaagacttcttcgcaagaacgaagagaatgaagaaacgtctgaggagcgagccccaaatttcaatttggcgaatctaaatgaggagatgtttaatgtggctgcgttgacgtggagagcagatgccaaaaagctagcgaaacagcttatgggtaatgataagctggcggatgctgcatacatgtggtggcagcacaacagggttacgctagaccagattgacacgttcctgaagcttgcaagccgcaagacgcaaggcgcaaagtacaatcagatctacaatagctacatgatgcacctggggctcactggatattaa

SEQ ID NO: 19 - protein, 126 aa, Artificial Sequence
  Avr3a-WM without signal sequence
MDQTKVLVYGTPAHYIHDSAGRRLLRKNEENEETSEERAPNFNLANLNEEMFNVAALTWRADAKKLAKQLMGNDKLADAAYMWWQHNRVTLDQIDTFLKLASRKTQGAKYNQIYNSYMMHLGLTGY

SEQ ID NO: 20 - DNA, 381 bp, Artificial Sequence
  cDNA
atggaccaaaccaaggtcctggtgtatgggacgccagctcactacatacacgattcagccggcagaagacttcttcgcaagaacgaagagaatgaagaaacgtctgaggagcgagccccaaatttcaatttggcgaatctaaatgaggagatgtttaatgtggctgcgttgacgccaagagcagatgccaaaaagctagcgaaacagcttatgggtaatgataagctggcggatgctgcatacatgtggtggcagcacaacagggttacgctagaccagattgacacgttcctgaagcttgcaagccgcaagacgcaaggcgcaaagtacaatcagatctacaatagctacatgatgcacctggggctcactggatattaa

SEQ ID NO: 21 - protein, 126 aa, Artificial Sequence
  Avr3a-PM without signal sequence
MDQTKVLVYGTPAHYIHDSAGRRLLRKNEENEETSEERAPNFNLANLNEEMFNVAALTPRADAKKLAKQLMGNDKLADAAYMWWQHNRVTLDQIDTFLKLASRKTQGAKYNQIYNSYMMHLGLTGY

SEQ ID NO: 22 - DNA, 381 bp, Artificial Sequence
  cDNA
atggaccaaaccaaggtcctggtgtatgggacgccagctcactacatacacgattcagccggcagaagacttcttcgcaagaacgaagagaatgaagaaacgtctgaggagcgagccccaaatttcaatttggcgaatctaaatgaggagatgtttaatgtggctgcgttgacgtgtagagcagatgccaaaaagctagcgaaacagcttatgggtaatgataagctggcggatgctgcatacatgtggtggcagcacaacagggttacgctagaccagattgacacgttcctgaagcttgcaagccgcaagacgcaaggcgcaaagtacaatcagatctacaatagctacatgatgcacctggggctcactggatattaa

SEQ ID NO: 23 - protein, 126 aa, Artificial Sequence
  Avr3a-CM without signal sequence
MDQTKVLVYGTPAHYIHDSAGRRLLRKNEENEETSEERAPNFNLANLNEEMFNVAALTCRADAKKLAKQLMGNDKLADAAYMWWQHNRVTLDQIDTFLKLASRKTQGAKYNQIYNSYMMHLGLTGY

SEQ ID NO: 24 - DNA, 381 bp, Artificial Sequence
  cDNA
atggaccaaaccaaggtcctggtgtatgggacgccagctcactacatacacgattcagccggcagaagacttcttcgcaagaacgaagagaatgaagaaacgtctgaggagcgagccccaaatttcaatttggcgaatctaaatgaggagatgtttaatgtggctgcgttgacgaacagagcagatgccaaaaagctagcgaaacagcttatgggtaatgataagctggcggatgctgcatacatgtggtggcagcacaacagggttacgctagaccagattgacacgttcctgaagcttgcaagccgcaagacgcaaggcgcaaagtacaatcagatctacaatagctacatgatgcacctggggctcactggatattaa

SEQ ID NO: 25 - protein, 126 aa, Artificial Sequence
  Avr3a-NM without signal sequence
MDQTKVLVYGTPAHYIHDSAGRRLLRKNEENEETSEERAPNFNLANLNEEMFNVAALTNRADAKKLAKQLMGNDKLADAAYMWWQHNRVTLDQIDTFLKLASRKTQGAKYNQIYNSYMMHLGLTGY

SEQ ID NO: 26 - DNA, 381 bp, Artificial Sequence
  cDNA
atggaccaaaccaaggtcctggtgtatgggacgccagctcactacatacacgattcagccggcagaagacttcttcgcaagaacgaagagaatgaagaaacgtctgaggagcgagccccaaatttcaatttggcgaatctaaatgaggagatgtttaatgtggctgcgttgacgcaaagagcagatgccaaaaagctagcgaaacagcttatgggtaatgataagctggcggatgctgcatacatgtggtggcagcacaacagggttacgctagaccagattgacacgttcctgaagcttgcaagccgcaagacgcaaggcgcaaagtacaatcagatctacaatagctacatgatgcacctggggctcactggatattaa

SEQ ID NO: 27 - protein, 126 aa, Artificial Sequence
  Avr3a-QM without signal sequence
MDQTKVLVYGTPAHYIHDSAGRRLLRKNEENEETSEERAPNFNLANLNEEMFNVAALTQRADAKKLAKQLMGNDKLADAAYMWWQHNRVTLDQIDTFLKLASRKTQGAKYNQIYNSYMMHLGLTGY

SEQ ID NO: 28 - DNA, 381 bp, Artificial Sequence
  cDNA
atggaccaaaccaaggtcctggtgtatgggacgccagctcactacatacacgattcagccggcagaagacttcttcgcaagaacgaagagaatgaagaaacgtctgaggagcgagccccaaatttcaatttggcgaatctaaatgaggagatgtttaatgtggctgcgttgacgacgagagcagatgccaaaaagctagcgaaacagcttatgggtaatgataagctggcggatgctgcatacatgtggtggcagcacaacagggttacgctagaccagattgacacgttcctgaagcttgcaagccgcaagacgcaaggcgcaaagtacaatcagatctacaatagctacatgatgcacctggggctcactggatattaa

SEQ ID NO: 29 - protein, 126 aa, Artificial Sequence
  Avr3a-TM without signal sequence
MDQTKVLVYGTPAHYIHDSAGRRLLRKNEENEETSEERAPNFNLANLNEEMFNVAALTTRADAKKLAKQLMGNDKLADAAYMWWQHNRVTLDQIDTFLKLASRKTQGAKYNQIYNSYMMHLGLTGY

SEQ ID NO: 30 - DNA, 381 bp, Artificial Sequence
  cDNA
atggaccaaaccaaggtcctggtgtatgggacgccagctcactacatacacgattcagccggcagaagacttcttcgcaagaacgaagagaatgaagaaacgtctgaggagcgagccccaaatttcaatttggcgaatctaaatgaggagatgtttaatgtggctgcgttgacgtctagagcagatgccaaaaagctagcgaaacagcttatgggtaatgataagctggcggatgctgcatacatgtggtggcagcacaacagggttacgctagaccagattgacacgttcctgaagcttgcaagccgcaagacgcaaggcgcaaagtacaatcagatctacaatagctacatgatgcacctggggctcactggatattaa

SEQ ID NO: 31 - protein, 126 aa, Artificial Sequence
  Avr3a-SM without signal sequence
MDQTKVLVYGTPAHYIHDSAGRRLLRKNEENEETSEERAPNFNLANLNEEMFNVAALTSRADAKKLAKQLMGNDKLADAAYMWWQHNRVTLDQIDTFLKLASRKTQGAKYNQIYNSYMMHLGLTGY

SEQ ID NO: 32 - DNA, 381 bp, Artificial Sequence
  cDNA
atggaccaaaccaaggtcctggtgtatgggacgccagctcactacatacacgattcagccggcagaagacttcttcgcaagaacgaagagaatgaagaaacgtctgaggagcgagccccaaatttcaatttggcgaatctaaatgaggagatgtttaatgtggctgcgttgacgatgagagcagatgccaaaaagctagcgaaacagcttatgggtaatgataagctggcggatgctgcatacatgtggtggcagcacaacagggttacgctagaccagattgacacgttcctgaagcttgcaagccgcaagacgcaaggcgcaaagtacaatcagatctacaatagctacatgatgcacctggggctcactggatattaa

SEQ ID NO: 33 - protein, 126 aa, Artificial Sequence
  Avr3a-MM without signal sequence
MDQTKVLVYGTPAHYIHDSAGRRLLRKNEENEETSEERAPNFNLANLNEEMFNVAALTMRADAKKLAKQLMGNDKLADAAYMWWQHNRVTLDQIDTFLKLASRKTQGAKYNQIYNSYMMHLGLTGY

SEQ ID NO: 34 - DNA, 381 bp, Artificial Sequence
  cDNA
atggaccaaaccaaggtcctggtgtatgggacgccagctcactacatacacgattcagccggcagaagacttcttcgcaagaacgaagagaatgaagaaacgtctgaggagcgagccccaaatttcaatttggcgaatctaaatgaggagatgtttaatgtggctgcgttgacgggcagagcagatgccaaaaagctagcgaaacagcttatgggtaatgataagctggcggatgctgcatacatgtggtggcagcacaacagggttacgctagaccagattgacacgttcctgaagcttgcaagccgcaagacgcaaggcgcaaagtacaatcagatctacaatagctacatgatgcacctggggctcactggatattaa

SEQ ID NO: 35 - protein, 126 aa, Artificial Sequence
  Avr3a-GM without signal sequence
MDQTKVLVYGTPAHYIHDSAGRRLLRKNEENEETSEERAPNFNLANLNEEMFNVAALTGRADAKKLAKQLMGNDKLADAAYMWWQHNRVTLDQIDTFLKLASRKTQGAKYNQIYNSYMMHLGLTGY

SEQ ID NO: 36 - DNA, 381 bp, Artificial Sequence
  cDNA
atggaccaaaccaaggtcctggtgtatgggacgccagctcactacatacacgattcagccggcagaagacttcttcgcaagaacgaagagaatgaagaaacgtctgaggagcgagccccaaatttcaatttggcgaatctaaatgaggagatgtttaatgtggctgcgttgacggccagagcagatgccaaaaagctagcgaaacagcttatgggtaatgataagctggcggatgctgcatacatgtggtggcagcacaacagggttacgctagaccagattgacacgttcctgaagcttgcaagccgcaagacgcaaggcgcaaagtacaatcagatctacaatagctacatgatgcacctggggctcactggatattaa

SEQ ID NO: 37 - protein, 126 aa, Artificial Sequence
  Avr3a-AM without signal sequence
MDQTKVLVYGTPAHYIHDSAGRRLLRKNEENEETSEERAPNFNLANLNEEMFNVAALTARADAKKLAKQLMGNDKLADAAYMWWQHNRVTLDQIDTFLKLASRKTQGAKYNQIYNSYMMHLGLTGY

SEQ ID NO: 38 - DNA, 381 bp, Artificial Sequence
  cDNA
atggaccaaaccaaggtcctggtgtatgggacgccagctcactacatacacgattcagccggcagaagacttcttcgcaagaacgaagagaatgaagaaacgtctgaggagcgagccccaaatttcaatttggcgaatctaaatgaggagatgtttaatgtggctgcgttgacgcttagagcagatgccaaaaagctagcgaaacagcttatgggtaatgataagctggcggatgctgcatacatgtggtggcagcacaacagggttacgctagaccagattgacacgttcctgaagcttgcaagccgcaagacgcaaggcgcaaagtacaatcagatctacaatagctacatgatgcacctggggctcactggatattaa

SEQ ID NO: 39 - protein, 126 aa, Artificial Sequence
  Avr3a-LM without signal sequence
MDQTKVLVYGTPAHYIHDSAGRRLLRKNEENEETSEERAPNFNLANLNEEMFNVAALTLRADAKKLAKQLMGNDKLADAAYMWWQHNRVTLDQIDTFLKLASRKTQGAKYNQIYNSYMMHLGLTGY

SEQ ID NO: 40 - DNA, 381 bp, Artificial Sequence
  cDNA
atggaccaaaccaaggtcctggtgtatgggacgccagctcactacatacacgattcagccggcagaagacttcttcgcaagaacgaagagaatgaagaaacgtctgaggagcgagccccaaatttcaatttggcgaatctaaatgaggagatgtttaatgtggctgcgttgacggtgagagcagatgccaaaaagctagcgaaacagcttatgggtaatgataagctggcggatgctgcatacatgtggtggcagcacaacagggttacgctagaccagattgacacgttcctgaagcttgcaagccgcaagacgcaaggcgcaaagtacaatcagatctacaatagctacatgatgcacctggggctcactggatattaa

SEQ ID NO: 41 - protein, 126 aa, Artificial Sequence
  Avr3a-VM without signal sequence
MDQTKVLVYGTPAHYIHDSAGRRLLRKNEENEETSEERAPNFNLANLNEEMFNVAALTVRADAKKLAKQLMGNDKLADAAYMWWQHNRVTLDQIDTFLKLASRKTQGAKYNQIYNSYMMHLGLTGY

SEQ ID NO: 42 - RNA, 381 nt, Artificial Sequence
  cDNA
atggaccaaaccaaggtcctggtgtatgggacgccagctcactacatacacgattcagccggcagaagacttcttcgcaagaacgaagagaatgaagaaacgtctgaggagcgagccccaaatttcaatttggcgaatctaaatgaggagatgtttaatgtggctgcgttgacgattagagcagatgccaaaaagctagcgaaacagcttatgggtaatgataagctggcggatgctgcatacatgtggtggcagcacaacagggttacgctagaccagattgacacgttcctgaagcttgcaagccgcaagacgcaaggcgcaaagtacaatcagatctacaatagctacatgatgcacctggggctcactggatattaa

SEQ ID NO: 43 - protein, 126 aa, Artificial Sequence
  Avr3a-IM without signal sequence
MDQTKVLVYGTPAHYIHDSAGRRLLRKNEENEETSEERAPNFNLANLNEEMFNVAALTIRADAKKLAKQLMGNDKLADAAYMWWQHNRVTLDQIDTFLKLASRKTQGAKYNQIYNSYMMHLGLTGY

SEQ ID NO: 44 - DNA, 2544 bp, Artificial Sequence
  cDNA
atggctgatgcctttctatcatttgcagttcaaaaattgggtgatttcctaatacagaaagtttccctgcgtaaaagtctcagagatgaaattagatggctgataaatgagctactcttcatacggtctttcctcagagatgcagaacaaaagcagtgcggagatcaaagagttcaacaatgggtgtttgagatcaactctattgctaatgatgctgttgctatactcgagacttatagctttgaggctggtaaaggtgctagtcgtctcaaggcttgcacttgcatatgtaggaaggagaagaaattctacaatgttgccgaggagattcaatcactcaagcaacgaatcatggatatctctcgcaaacgagagacttatggtattacaaatatcaattataattcaggagaaaggccaagtaatcaggttacaacattgaggagaactacctcatatgtagatgaacaggattacatttttgttggctttcaggatgttgtacaaacattgctagctcaacttctgaaagcagagcctcgtcgaagcgtcctctccatttatggaatggggggtttaggcaagaccactcttgccagaaaactttacaccagtcctgatatactcaatagctttcctacacgcgcttggatatgtgtctctcaagagtacaacacaatggatcttcttaggactatcataaaatccatccaaggctgcgccaaggaaactctagatttgttggaaaagatggcagaaatagatctagaaaatcaccttcgtgatctattgaaagaatgcaaataccttgtggtggttgatgatgtatggcagagagaagcatgggagagtttgaaaagagcattcccggatggcaagaatggaagcagagtcattattaccacgcgcaaagaggatgtcgctgaaagagtagaccacagaggttttgttcataaacttcgtttcctaagtcaagaagaaagttgggatctctttcgtaggaaactacttgatgttcgagcaatggttccagaaatggaaagtttagctaaggatatggtggaaaagtgtagaggcttacctcttgcaattgttgtattgagcggactactttcgcataaaaaggggctaaaccaatggcaaaaggtgaaagatcacctttggaagaacattaaagaagataaatctattgaaatctctaacatactatccttaagctacaatgatttgtcaactgcgctcaagcagtgttttctctactttggtatttttccagaagatcaagtggtaaaggctgatgacataatacggttgtggatggcggagggtttcatacccagaggagaagaaagaatggaggatgtggctgacggcttcttgaatgaactgataagacgaagcttggttcaagtagctaaaacattttgggaaaaagttactgactgtagggttcatgatttacttcgtgatcttgcgatacaaaaggcattggaggtaaacttctttgacgtttatggtccaagaagccactccatatcctctttatgtatcagacatggcattcatagtgaaggagaaaggtacctctcatcacttgatctttctaacttgaagttgaggtcaattatgttcttcgatccagattttcgtaagatgagtcatataaacctcaggagtgagttccaacatctgtatgtgttgtacttggatacgaattttgggtatgtgtctatggtacctgatgccataggaagtttgtaccacctcaagttgttaagattgagaggtatccatgatattccgtcttccattggcaacctcaagaatttacaaacacttgtcgttgtaaatggttacacatttttttgccaactaccctgcaagacagctgacctaataaatctaagacatttagttgttcaatattcagagcctttaaaatgtataaacaaactcactagtcttcaagttcttgatggtgttgcttgtgatcagtggaaagatgttgaccctgttgatttagtcaatcttcgagaattaagcatggatcgtatcaggagctcttactccctaaacaacattagcagcttgaaaaaccttagcactctcaaattgatttgtggagaacgtcaatcatttgcatcccttgaatttgttaattgttgtgaaaagctccagaaattgtggttacaagggagaatagaggaactgcctcatctgttttcaaactccatcacaatgatggttctgagtttctcagaactgacagaagatccgatgcctattttgggaaggtttccaaacctaaggaatctcaaattagatggagcttatgaaggaaaagaaataatgtgcagtgataacagcttcagtcaactagagttccttcatcttcgtgatctttggaagctagaaagatgggatttaggcacaagtgccatgcctctgattaaaggtcttggtatccataactgtccaaatttaaaggagattcctgagagaatgaaagacatggagctgttgaagcggaattatatgttgtga

SEQ ID NO: 45 - protein, 847 aa, Solanum bulbocastanum
MADAFLSFAVQKLGDFLIQKVSLRKSLRDEIRWLINELLFIRSFLRDAEQKQCGDQRVQQWVFEINSIANDAVAILETYSFEAGKGASRLKACTCICRKEKKFYNVAEEIQSLKQRIMDISRKRETYGITNINYNSGERPSNQVTTLRRTTSYVDEQDYIFVGFQDVVQTLLAQLLKAEPRRSVLSIYGMGGLGKTTLARKLYTSPDILNSFPTRAWICVSQEYNTMDLLRTIIKSIQGCAKETLDLLEKMAEIDLENHLRDLLKECKYLVVVDDVWQREAWESLKRAFPDGKNGSRVIITTRKEDVAERVDHRGFVHKLRFLSQEESWDLFRRKLLDVRAMVPEMESLAKDMVEKCRGLPLAIVVLSGLLSHKKGLNQWQKVKDHLWKNIKEDKSIEISNILSLSYNDLSTALKQCFLYFGIFPEDQVVKADDIIRLWMAEGFIPRGEERMEDVADGFLNELIRRSLVQVAKTFWEKVTDCRVHDLLRDLAIQKALEVNFFDVYGPRSHSISSLCIRHGIHSEGERYLSSLDLSNLKLRSIMFFDPDFRKMSHINLRSEFQHLYVLYLDTNFGYVSMVPDAIGSLYHLKLLRLRGIHDIPSSIGNLKNLQTLVVVNGYTFFCQLPCKTADLINLRHLVVQYSEPLKCINKLTSLQVLDGVACDQWKDVDPVDLVNLRELSMDRIRSSYSLNNISSLKNLSTLKLICGERQSFASLEFVNCCEKLQKLWLQGRIEELPHLFSNSITMMVLSFSELTEDPMPILGRFPNLRNLKLDGAYEGKEIMCSDNSFSQLEFLHLRDLWKLERWDLGTSAMPLIKGLGIHNCPNLKEIPERMKDMELLKRNYML

SEQ ID NO: 46 - DNA, 351 bp, Artificial Sequence
  cDNA
atgcgtctcgcctacattttcgccgtgatgatggcgggtgctctaccttattgcaatgcgctgcatgcagctccaggtgccaaggcactgaataaaatcaaaactttccccgattttgccgccccaagccctaaagacggcaaccgtctgctgcgccgtgtcgataatggggaatttgagatcgaggaagagagaggattcagtctgaaggataccctgaagaagctcaatcccattaaagctgcggtaaaggcgaaggacaaggctaaagaggtcacggaaaagatcacggatgccgactggaagaagctagttgagcatttgaaaattaagggtgacaagaggagttaa

SEQ ID NO: 47 - protein, 116 aa, Phytophthora infestans
MRLAYIFAVMMAGALPYCNALHAAPGAKALNKIKTFPDFAAPSPKDGNRLLRRVDNGEFEIEEERGFSLKDTLKKLNPIKAAVKAKDKAKEVTEKITDADWKKLVEHLKIKGDKRS

SEQ ID NO: 48 - DNA, 2538 bp, Artificial Sequence
  cDNA
atggctgatgcctttctatcatttgcagttcaaaaattgggtgatttcctcattcaacaagtttctctgcgtaaaaatctgagaaaggaaattgagtggctgagaaatgagctactcttcatacagtctttcctcagagatgcagaactaaagcaatatggagatcaaagagttcaacaatgggtgtttgagatcaactctattgctaatgatgttgttgctatactcgagacttacaccttcgaggctggtaaaggtgctagtcgtctcaaggcttgcgcttgcatatatacgaaggagaagaaattctacaatgttgccgaggagatccaatcactcaagcaacgaatcatggatatctctcgcaaacgagagacttatggtattacaaatatcaataataattcaggagaagggccaagtaatcaggttagaacattgaggagaactacctcatatgtggatgaccaggattacatttttgttggacttcaggatgttgtacaaaaattgctagctcaacttctcaaagcagagccccgtcgaaccgtcctctccattcatggcatgggcggattgggcaagaccactcttgcgagaaaactttacaacagttctgctatactcaatagcttccctacacgcgcttggatatgtgtctctcaagagtacaacacaatggatcttcttaggaatatcataaaatccgtccaaggtcgcaccaaggaaactctagatttgttggaaaggatgacagaaggagatctagaaatctatcttcgtgatctattaaaagaacgcaaataccttgtgatggttgatgatgtatggcagaaagaagcatgggatagtttgaagagagcattcccggatagcaagaatggcagcagagtcattattaccacgcgcaaacaggatgtcgctgaaagagcagacgacataggttttgttcataaacttcgtttcctaagtcaagaagaaagttgggatctctttcgtaagaaactacttgatgttcgatcaatggttccagaaatggaaaatctagctaaggatatggtggaaaagtgtagaggcttacctcttgcaattgttgtattgagcggactactttcgcataaaaaggggctaaaccaatggcaaaaggtgaaagatcacctttggaagaacattaaagaagataaatctattgaaatctctaacatactatccttaagctacaatgatttgtcaactgcgctcaagcagtgttttctctactttggtatttttccagaagatcaagtggtaaaggctgatgacataatacggttgtggatggcggagggtttcatacccagaggagaagaaagaatggaggatgtggctgacggcttcttgaatgaactgataagacgaagcttggttcaagtagctaaaacattttgggaaaaagttactgactgtagggttcatgatttacttcgtgatcttgcgatacaaaaggtattggaggtaaacttctttgacatttatgatccaagaagccactccatatcctctttatgtatcagacatggcattcatagtgaaggagaaaggtacctctcatcacttgatctttctaacttgaagttgaggtcaattatgttcttcgatccatatatttgtaatgtgttccaacatatagatgtgtttcgacatctatatgtgttgtacttggatacgaattttgggtatgtgtctatggtacctgatgccataggaagtttgtaccacctcaagttgttaagattgagaggtatccatgatattccgtcttccattggcaacctcaagaatttacaaacacttgtcgttgtaaatggttacacatttttttgcgaactaccctgcaagacagctgacctaataaatctaagacatttagttgttcaatatacagagcctttaaaatgtataaacaaactcactagtcttcaagttcttgatggtgttgcttgtgatcagtggaaagatgttgaccctgttgatttagtcaatcttcgagaattaagcatggatcgtatcaggagctcttactccctaaacaacattagcagcttgaaaaaccttagcactctcaaattgatttgtggagaacgtcaatcatttgcatcccttgaatttgttaattgttgtgaaaagctccagaaattgtggttacaagggagaatagaggaactgcctcatctgttttcaaactccatcacaatgatggttctgagtttctcagaactgacagaagatccgatgcctattttgggaaggtttccaaacctaaggaatctcaaattagatggagcttacgaaggaaaagaaataatgtgcagtgataacagcttcagtcaactagagttccttcatcttcgtgatctttggaagctagaaagatgggatttaggcacaagtgccatgcctctgattaaaggtcttggtatccataactgtccaaatttaaaggagattcctgagagaatgaaagacgtggagctgttgaagcggaattatatgttgtga

SEQ ID NO: 49 - protein, 845 aa, Solanum demissum
MADAFLSFAVQKLGDFLIQQVSLRKNLRKEIEWLRNELLFIQSFLRDAELKQYGDQRVQQWVFEINSIANDVVAILETYTFEAGKGASRLKACACIYTKEKKFYNVAEEIQSLKQRIMDISRKRETYGITNINNNSGEGPSNQVRTLRRTTSYVDDQDYIFVGLQDVVQKLLAQLLKAEPRRTVLSIHGMGGLGKTTLARKLYNSSAILNSFPTRAWICVSQEYNTMDLLRNIIKSVQGRTKETLDLLERMTEGDLEIYLRDLLKERKYLVMVDDVWQKEAWDSLKRAFPDSKNGSRVIITTRKQDVAERADDIGFVHKLRFLSQEESWDLFRKKLLDVRSMVPEMENLAKDMVEKCRGLPLAIVVLSGLLSHKKGLNQWQKVKDHLWKNIKEDKSIEISNILSLSYNDLSTALKQCFLYFGIFPEDQVVKADDIIRLWMAEGFIPRGEERMEDVADGFLNELIRRSLVQVAKTFWEKVTDCRVHDLLRDLAIQKVLEVNFFDIYDPRSHSISSLCIRHGIHSEGERYLSSLDLSNLKLRSIMFFDPYICNVFQHIDVFRHLYVLYLDTNFGYVSMVPDAIGSLYHLKLLRLRGIHDIPSSIGNLKNLQTLVVVNGYTFFCELPCKTADLINLRHLVVQYTEPLKCINKLTSLQVLDGVACDQWKDVDPVDLVNLRELSMDRIRSSYSLNNISSLKNLSTLKLICGERQSFASLEFVNCCEKLQKLWLQGRIEELPHLFSNSITMMVLSFSELTEDPMPILGRFPNLRNLKLDGAYEGKEIMCSDNSFSQLEFLHLRDLWKLERWDLGTSAMPLIKGLGIHNCPNLKEIPERMKDVELLKRNYML

SEQ ID NO: 50 - DNA, 2538 bp, Artificial Sequence
  cDNA
atggctgatgcctttctatcatttgcagttcaaaaattgggtgatttcctaatacagaaagtttccctgcgtaaaagtctcagagacgaaattagatggctgatcaatgagctactcttcatacggtctttcctcagagatgcagaacaaaagcagtgcggagatcaaagagttcaacaatgggtgtttgagatcaactctattgctaatgatgctgttgctatactcgagacttatagctttgaggctggtaaaggtgctagtcgtctcaaggcttgcacttgcatatgtaggaaggagaagaaattctacaatgttgccgaggagattcaatcactcaagcaacgaatcatggatatctctcgcaaacgagagacttatggtattacaaatatcaataataatgcaggagaagggccaagtaatcaggttacaaaattgaggagaactacctcatatgtagatgaacaggattacatttttgttggctttcaggatgttgtacaaacatttctagctcaacttctgaaagcagagcctcgtcgaagcgtcctctccatttatggaatggggggtttaggcaagaccactcttgccagaaaactttacaccagtcctgatatactcaatagcttccgtacacgcgcttggatatgtgtctctcaagagtacaacacaatggatcttcttaggaatatcataaaatccatccaaggtcgcaccaaggaaactctagatttgttggaaaggatgacagaaggagatcttgaaatttatcttcgtgatttattgaaagaacgcaaataccttgtggtggttgatgatgtatggcagagagaagcatgggagagtttgaaaagatcattcccggatggcaagaatggcagcagagtcattattaccacgcgcaaagaggatgtcgctgaaagagcagacgacagaggttttgttcataaacttcgtttcctaagccaagaagaaagttgggatctctttcgtaggaaactacttgatgttcgagcaatggttccagaaatggaaagtctagctaaggatatggtggaaaagtgtagaggcttacctcttgcaattgttgtattgagcggactactttcgcataaaaaggggctaaaccaatggcaaaaggtgaaagatcacctttggaagaacattaaagaagataaatctattgaaatctctaacatactatccttaagctacaatgatttgtcaactgcgctcaagcagtgttttctctactttggtatttttccagaagatcaagtggtaaaggctgatgacataatacggttgtggatggcggagggtttcatacccagaggagaagaaagaatggaggatgtggctgacggcttcttgaatgaactgataagacgaagcttggttcaagtagctaaaacattttgggaaaaagttactgactgtagggttcatgatttacttcgtgatcttgcgatacaaaaggcattggaggtaaacttctttgacatttatgatccaagaagccactccatatcctctttatgtatcagacatggcattcatagtgaaggagaaaggtacctctcatcacttgatctttctaacttgaagttgaggtcaattatgttcttcgatccatatatttgtaatgtgttccaacatatagatgtgtttcgacatctatatgtgttgtacttggatacgaattttgggtatgtgtctatggtacctgatgccataggaagtttgtaccacctcaagttgttaagattgagaggtatccatgatattccgtcttccattggcaacctcaagaatttacaaacacttgtcgttgtaaatggttacacatttttttgcgaactaccctgcaagacagctgacctaataaatctaagacatttagttgttcaatatacagagcctttaaaatgtataaacaaactcactagtcttcaagttcttgatggtgttgcttgtgatcagtggaaagatgttgaccctgttgatttagtcaatcttcgagaattaagcatggatcgtatcaggagctcttactccctaaacaacattagcagcttgaaaaaccttagcactctcaaattgatttgtggagaacgtcaatcatttgcatcccttgaatttgttaattgttgtgaaaagctccagaaattgtggttacaagggagaatagaggaactgcctcatctgttttcaaactccatcacaatgatggttctgagtttctcagaactgacagaagatccgatgcctattttgggaaggtttccaaacctaaggaatctcaaattagatggagcttacgaaggaaaagaaataatgtgcagtgataacagcttcagtcaactagagttccttcatcttcgtgatctttggaagctagaaagatgggatttaggcacaagtgccatgcctctgattaaaggtcttggtatccataactgtccaaatttaaaggagattcctgagagaatgaaagacgtggagctgttgaagcggaattatatgttgtga

SEQ ID NO: 51 - protein, 845 aa, Solanum
MADAFLSFAVQKLGDFLIQKVSLRKSLRDEIRWLINELLFIRSFLRDAEQKQCGDQRVQQWVFEINSIANDAVAILETYSFEAGKGASRLKACTCICRKEKKFYNVAEEIQSLKQRIMDISRKRETYGITNINNNAGEGPSNQVTKLRRTTSYVDEQDYIFVGFQDVVQTFLAQLLKAEPRRSVLSIYGMGGLGKTTLARKLYTSPDILNSFRTRAWICVSQEYNTMDLLRNIIKSIQGRTKETLDLLERMTEGDLEIYLRDLLKERKYLVVVDDVWQREAWESLKRSFPDGKNGSRVIITTRKEDVAERADDRGFVHKLRFLSQEESWDLFRRKLLDVRAMVPEMESLAKDMVEKCRGLPLAIVVLSGLLSHKKGLNQWQKVKDHLWKNIKEDKSIEISNILSLSYNDLSTALKQCFLYFGIFPEDQVVKADDIIRLWMAEGFIPRGEERMEDVADGFLNELIRRSLVQVAKTFWEKVTDCRVHDLLRDLAIQKALEVNFFDIYDPRSHSISSLCIRHGIHSEGERYLSSLDLSNLKLRSIMFFDPYICNVFQHIDVFRHLYVLYLDTNFGYVSMVPDAIGSLYHLKLLRLRGIHDIPSSIGNLKNLQTLVVVNGYTFFCELPCKTADLINLRHLVVQYTEPLKCINKLTSLQVLDGVACDQWKDVDPVDLVNLRELSMDRIRSSYSLNNISSLKNLSTLKLICGERQSFASLEFVNCCEKLQKLWLQGRIEELPHLFSNSITMMVLSFSELTEDPMPILGRFPNLRNLKLDGAYEGKEIMCSDNSFSQLEFLHLRDLWKLERWDLGTSAMPLIKGLGIHNCPNLKEIPERMKDVELLKRNYML

SEQ ID NO: 52 - DNA, 2544 bp, Artificial Sequence
  cDNA
atggctgatgcctttctatcatttgcagttcaaaaattgggtgatttcctaatacagaaagtttccctgcgtaaaagtctcagagatgaaattagatggctgatcaatgagctactcttcatacggtctttcctcagagatgcagaacaaaagcagtgcggagatcaaagagttcaacaatgggtgtttgagatcaactctattgctaatgatgctgttgctatactcgagacttatagctttgaggctggtaaaggtgctagtcgtctcaaggcttgcacttgcatatgtaggaaggagaagaaattctacaatgttgccgaggagattcaatcactcaagcaacgaatcatggatatctctcgcaaacgagagacttatggtattacaaatatcaataataatgcaggagaagggccaagtaatcaggttacaaaattgaggagaactacctcatatgtagatgaacaggattacatttttgttggctttcaggatgttgtacaaacatttctagctcaacttctgaaagcagagcctcgtcgaaccgtcctctccatttatggaatggggggtttaggcaagaccactcttgccagaaaactttacaccagtcctgatatactcaatagcttccgtacacgcgcttggatatgtgtctctcaagagtacaacacaatggatcttcttaggaatatcataaaatccatccaaggtcgcaccaaggaaactctagatttgttggaaaggatgacagaaggagatcttgaaatttatcttcgtgatttattgaaagaacgcaaataccttgtggtggttgatgatgtatggcagagagaagcatgggagagtttgaaaagatcattcccggatggcaagaatggcagcagagtcattattaccacgcgcaaagaggatgtcgctgaaagagcagacgacagaggttttgttcataaacttcgtttcctaagccaagaagaaagttgggatctctttcgtaggaaactacttgatgttcgagcaatggttccagaaatggaaagtctagctaaggatatggtggaaaagtgtagaggcttacctcttgcaattgttgtattgagcggactactttcgcataaaaaggggctaaaccaatggcaaaaggtgaaagatcacctttggaagaacattaaagaagataaatctattgaaatctctaacatactatccttaagctacaatgatttgtcaactgcgctcaagcagtgttttctctactttggtatttttccagaagatcaagtggtaaaggctgatgacataatacggttgtggatggcggagggtttcatacccagaggagaagaaagaatggaggatgtggctgacggcttcttgaatgaactgataagacgaagcttggttcaagtagctaaaacattttgggaaaaagttactgactgtagggttcatgatttacttcgtgatcttgcgatacaaaaggcattggaggtaaacttctttgacatttatgatccaagaagccactccatatcctctttatgtatcagacatggcattcatagtgaaggagaaaggtacctctcatcacttgatctttctaacttgaagttgaggtcaattatgttcttcgatccagattttcgtaagatgagtcatataaacctcaggagtgagttccaacatctatatgtgttgtacttggatacgaattttgggtatgtgtctatggtacctgatgccataggaagtttgtaccacctcaagttgttaagattgagaggtatccatgatattccgtcttccattggcaacctcaagaatttacaaacacttgtcgttgtaaatggttacacatttttttgcgaactaccctgcaagacagctgacctaataaatctaagacatttagttgttcaatatacagagcctttaaaatgtataaacaaactcactagtcttcaagttcttgatggtgttgcttgtgatcagtggaaagatgttgaccctgttgatttagtcaatcttcgagaattaagcatggatcgtatcaggagctcttactccctaaacaacattagcagcttgaaaaaccttagcactctcaaattgatttgtggagaacgtcaatcatttgcatcccttgaatttgttaattgttgtgaaaagctccagaaattgtggttacaagggagaatagaggaactgcctcatctgttttcaaactccatcacaatgatggttctgagtttctcagaactgacagaagatccgatgcctattttgggaaggtttccaaacctaaggaatctcaaattagatggagcttacgaaggaaaagaaataatgtgcagtgataacagcttcagtcaactagagttccttcatcttcgtgatctttggaagctagaaagatgggatttaggcacaagtgcgatgcctctgattaaaggtcttggtatccataactgtccaaatttaaaggagattcctgagagaatgaaagacgtggagctgttgaagcggaattatatgttgtga

SEQ ID NO: 53 - protein, 847 aa, Solanum edinense
MADAFLSFAVQKLGDFLIQKVSLRKSLRDEIRWLINELLFIRSFLRDAEQKQCGDQRVQQWVFEINSIANDAVAILETYSFEAGKGASRLKACTCICRKEKKFYNVAEEIQSLKQRIMDISRKRETYGITNINNNAGEGPSNQVTKLRRTTSYVDEQDYIFVGFQDVVQTFLAQLLKAEPRRTVLSIYGMGGLGKTTLARKLYTSPDILNSFRTRAWICVSQEYNTMDLLRNIIKSIQGRTKETLDLLERMTEGDLEIYLRDLLKERKYLVVVDDVWQREAWESLKRSFPDGKNGSRVIITTRKEDVAERADDRGFVHKLRFLSQEESWDLFRRKLLDVRAMVPEMESLAKDMVEKCRGLPLAIVVLSGLLSHKKGLNQWQKVKDHLWKNIKEDKSIEISNILSLSYNDLSTALKQCFLYFGIFPEDQVVKADDIIRLWMAEGFIPRGEERMEDVADGFLNELIRRSLVQVAKTFWEKVTDCRVHDLLRDLAIQKALEVNFFDIYDPRSHSISSLCIRHGIHSEGERYLSSLDLSNLKLRSIMFFDPDFRKMSHINLRSEFQHLYVLYLDTNFGYVSMVPDAIGSLYHLKLLRLRGIHDIPSSIGNLKNLQTLVVVNGYTFFCELPCKTADLINLRHLVVQYTEPLKCINKLTSLQVLDGVACDQWKDVDPVDLVNLRELSMDRIRSSYSLNNISSLKNLSTLKLICGERQSFASLEFVNCCEKLQKLWLQGRIEELPHLFSNSITMMVLSFSELTEDPMPILGRFPNLRNLKLDGAYEGKEIMCSDNSFSQLEFLHLRDLWKLERWDLGTSAMPLIKGLGIHNCPNLKEIPERMKDVELLKRNYML

SEQ ID NO: 54 - DNA, 3882 bp, Artificial Sequence
  cDNA
atgaatttcaacaatgaattgtctgatctgaaaaatcgcttcctatttaggacgctgagagcccagaaatgctcggatgttgcaagagatcgaatagatttctttatatgggagttaaaattccttaattgttttctccatttgcagagcttcgcttttgcaagtgaatgtggtatgctagatatctcacagaaaatgatagaaatttgcaagaggtttaatacaccacctccacataattcatttgcatactggaaggaggtaatttgcaagaggctgtgcgctattagcatccagccggatgctagttcagatgatggatttgcatgctggaagaaagtaatttggaagactaagcaagaattcagagctaaatactcctttccaaaaacactacttgcagacaacaaggtatatgatgatgatgatactaatcccaaatttgtgatggaattcatcgatgctgttgtggggaatctcaatgttctagtcaagatcaatgatccatcttcattgctttttgttccaggacccaaggaacaaatagaacaagtgttaaaggagttgaagttattgagattttttgtctgctttgtttcaaacaaatgtatagagcctcaataccaacatactactttttatactcacgctttaattgaggctagccacatcgcaatggttgtgtggttgaatttgccaatctatggaaacagaaatcaagacttggcttcaagtgaagttagttgtttgctttctgatttcatggaaatgaagattaagtccattcagccagacatcagccgcaacaatatttatattgatgtcttgagggcgttgaagtcaaccataccacaagctcaagataagcatgctgctgagagtggcattgtggagactccaacacacaatctgatggttggtttgagtgatcaaatggccaaccttcaggagatgctctgccttctaagagacaatctcattcatctgccaatactagatctggaatttcatcttcaagatatggattctgttattgttgatgccggacttcttatttactcattatatgatatcaaggggcagaaggaagacacaacattggaggatatcaaccaggcacttggttttgatcttcccagaaacattgagcctatcaaggcaatgatcaaccttgtcatgcaaaaggcatttcaatgtaacttgccaaggattcatggactaggttatgtcgattttctattgaaaaacctgaaggatttccaaggccgttattcagattcactcgatttcctcaagaatcaacttcaagttattcaaactgaatttgagagcttgcaacctttcttgaaggttgtcgtagaagagccacacaataagctcaagacactgaatgaagattgtgctacacagataattaggaaagcatatgaggtggaatatgtagttgatgcttgtataaacaaagaggttcctcagtggtgcatcgagcgttggctcctggatatcatagaggagattacttgtatcaaagcaaagattcaggaaaagaacacggttgaggatacaatgaagactgtcattgctcgtacatcatcaaaactggcaaggactccaaggatgaatgaagagattgttgggtttgaggatgtcatagaaaatttaagaaaaaaactactgaatggaaccaaagggcaagatgtcatttcaattcacggcatgccaggtttaggtaagacgactttagccaacagtctctattctgacaggtcagttttttctcaatttgatatttgtgcacaatgttgtgtgtctcaagtatattcttataaggacttaatattggccttgctacgtgatgctattggtgagggttctgtgcgtagagaacttcatgccaatgaattagctgatatgcttcgcaaaactctattgccccgaaggtaccttatccttgttgatgacgtgtgggaaaatagtgtttgggatgatttaagaggttgttttccagatgtcaataacagaagcagaatcattctaacaacaagacatcatgaagttgccaaatatgctagtgttcatagtgatccccttcatcttcgtatgtttgacgaagttgaaagttggaagttgcttgaaaagaaagtgtttggtgaagaaagctgttcccctctcctaaaaaatgttgggctaagaatagcaaaaatgtgtggacaactacctctttcaattgttctggtggctggtattctgtcagagatggaaaaggaagtagaatgttgggaacaagtggccaacaatttgggttcctacattcacaatgactcaagagccattgtagacaaaagttatcatgttttaccttgtcatcttaagtcttgcttcctttattttggagcatttttagaagatagagtgattgacatttcaaggttaataaggctatggatatcagaagcatttataaaaagtagtgaaggcaggaggttggaggatatagcagaaggttacttggagaatcttattggaagaaatctagtaatggttactcagaggtccatttcagatggtaaggcgaaagaatgtcgccttcatgatgtattactcgacttctgcaaggaaagagcagctgaggagaattttctactatggataaatagggatcagattaccaaaccttcttcctgtgtttactctcacaagcagcatgctcacttggccttcactgaaatgcataatcttgtagaatggagtgcgtcttgctcatttgttggctcggtagtactttccaataaatatgactcatacttttccactcgtgacatatcctcactacatgatttttcaatttcacgcattttaccaaatttcaagtttctaaaagtgttagatttggaacaccgggtttttattgattttattccaactgagcttgtttacttgaagtatttttctgcacacattgaacagaattcaattccttcaagcatatccaatctttggaaccttgaaactcttatattaaaaagtccaatatatgcgttacgttgcacgctactactacctagtacagtttgggatatggttaaattgagacatctgtatattcctgacttcagcacaaggattgaagcagcattacttgagaactctgcaaaactttataatttggaaaccctttccactctatatttctctcgtgttgaggatgcagaattgatgctgagaaaaacacctaatcttcgaaaactgatatgtgaagttgaatgtttagaatacccccctcagtaccatgtgttgaattttccaatacggcttgaaatactaaagctttatcgatcaaaatttaaaaccatccccttttgcatctctgcaccaaatctcaaatacttgaaactctgtggcttttccctggattctcagtacttatcagaaactgctgatcatctcaagcaccttgaggtactcatactgtacaaggttgaatttggtgatcatagggaatggaaagtgagcaatggcaagttccctcaactcaaaatcttgaaactagaatatttgtccttggtgaaatggattgtagctgatgatgcctttcctaaccttgaacaattggttttgcgtggatgtcaagatcttatggagatcccttcttgtttcatggacatcctttctctcaagtacatcggggtagaatactgcaatgagtcggttgtcaagtcagccttgaatatacaagaaacacaagtcgaagattatcaaaatactaatttcaagctcgttctcatcgagttttctttgcagaaaaaggcgtggaaattaaatttaactgatgcggaagatatgcacaatgcagtaaaaaatattcttgcagaaataagatag

SEQ ID NO: 55 - protein, 1293 aa, Solanum tuberosum
MNFNNELSDLKNRFLFRTLRAQKCSDVARDRIDFFIWELKFLNCFLHLQSFAFASECGMLDISQKMIEICKRFNTPPPHNSFAYWKEVICKRLCAISIQPDASSDDGFACWKKVIWKTKQEFRAKYSFPKTLLADNKVYDDDDTNPKFVMEFIDAVVGNLNVLVKINDPSSLLFVPGPKEQIEQVLKELKLLRFFVCFVSNKCIEPQYQHTTFYTHALIEASHIAMVVWLNLPIYGNRNQDLASSEVSCLLSDFMEMKIKSIQPDISRNNIYIDVLRALKSTIPQAQDKHAAESGIVETPTHNLMVGLSDQMANLQEMLCLLRDNLIHLPILDLEFHLQDMDSVIVDAGLLIYSLYDIKGQKEDTTLEDINQALGFDLPRNIEPIKAMINLVMQKAFQCNLPRIHGLGYVDFLLKNLKDFQGRYSDSLDFLKNQLQVIQTEFESLQPFLKVVVEEPHNKLKTLNEDCATQIIRKAYEVEYVVDACINKEVPQWCIERWLLDIIEEITCIKAKIQEKNTVEDTMKTVIARTSSKLARTPRMNEEIVGFEDVIENLRKKLLNGTKGQDVISIHGMPGLGKTTLANSLYSDRSVFSQFDICAQCCVSQVYSYKDLILALLRDAIGEGSVRRELHANELADMLRKTLLPRRYLILVDDVWENSVWDDLRGCFPDVNNRSRIILTTRHHEVAKYASVHSDPLHLRMFDEVESWKLLEKKVFGEESCSPLLKNVGLRIAKMCGQLPLSIVLVAGILSEMEKEVECWEQVANNLGSYIHNDSRAIVDKSYHVLPCHLKSCFLYFGAFLEDRVIDISRLIRLWISEAFIKSSEGRRLEDIAEGYLENLIGRNLVMVTQRSISDGKAKECRLHDVLLDFCKERAAEENFLLWINRDQITKPSSCVYSHKQHAHLAFTEMHNLVEWSASCSFVGSVVLSNKYDSYFSTRDISSLHDFSISRILPNFKFLKVLDLEHRVFIDFIPTELVYLKYFSAHIEQNSIPSSISNLWNLETLILKSPIYALRCTLLLPSTVWDMVKLRHLYIPDFSTRIEAALLENSAKLYNLETLSTLYFSRVEDAELMLRKTPNLRKLICEVECLEYPPQYHVLNFPIRLEILKLYRSKFKTIPFCISAPNLKYLKLCGFSLDSQYLSETADHLKHLEVLILYKVEFGDHREWKVSNGKFPQLKILKLEYLSLVKWIVADDAFPNLEQLVLRGCQDLMEIPSCFMDILSLKYIGVEYCNESVVKSALNIQETQVEDYQNTNFKLVLIEFSLQKKAWKLNLTDAEDMHNAVKNILAEIR

SEQ ID NO: 56 - DNA, 4102 bp, Solanum tuberosum
atgaatttcaacaatgaattgtctgatctgaaaaatcgcttcctatttaggacgctgagagcccagaaatgctcggatgttgcaagagatcgaatagatttctttatatgggagttaaaattccttaattgttttctccatttgcagagcttcgcttttgcaagtgaatgtggtatgctagatatctcacagaaaatgatagaaatttgcaagaggtttaatacaccacctccacataattcatttgcatactggaaggaggtaatttgcaagaggctgtgcgctattagcatccagccggatgctagttcagatgatggatttgcatgctggaagaaagtaatttggaagactaagcaagaattcagagctaaatactcctttccaaaaacactacttgcagacaacaaggtatatgatgatgatgatactaatcccaaatttgtgatggaattcatcgatgctgttgtggggaatctcaatgttctagtcaagatcaatgatccatcttcattgctttttgttccaggacccaaggaacaaatagaacaagtgttaaaggagttgaagttattgagattttttgtctgctttgtttcaaacaaatgtatagagcctcaataccaacatactactttttatactcacgctttaattgaggctagccacatcgcaatggttgtgtggttgaatttgccaatctatggaaacagaaatcaagacttggcttcaagtgaagttagttgtttgctttctgatttcatggaaatgaagattaagtccattcagccagacatcagccgcaacaatatttatattgatgtcttgagggcgttgaagtcaaccataccacaagctcaagataagcatgctgctgagagtggcattgtggagactccaacacacaatctgatggttggtttgagtgatcaaatggccaaccttcaggagatgctctgccttctaagagacaatctcattcatctgccaatactagatctggaatttcatcttcaagatatggattctgttattgttgatgccggacttcttatttactcattatatgatatcaaggggcagaaggaagacacaacattggaggatatcaaccaggcacttggttttgatcttcccagaaacattgagcctatcaaggcaatgatcaaccttgtcatgcaaaaggcatttcaatgtaacttgccaaggattcatggactaggttatgtcgattttctattgaaaaacctgaaggatttccaaggccgttattcagattcactcgatttcctcaagaatcaacttcaagttattcaaactgaatttgagagcttgcaacctttcttgaaggttgtcgtagaagagccacacaataagctcaagacactgaatgaagattgtgctacacagataattaggaaagcatatgaggtggaatatgtagttgatgcttgtataaacaaagaggttcctcagtggtgcatcgagcgttggctcctggatatcatagaggagattacttgtatcaaagcaaagattcaggaaaagaacacggttgaggatacaatgaagactgtcattgctcgtacatcatcaaaactggcaaggactccaaggatgaatgaagagattgttgggtttgaggatgtcatagaaaatttaagaaaaaaactactgaatggaaccaaagggcaagatgtcatttcaattcacggcatgccaggtttaggtaagacgactttagccaacagtctctattctgacaggtcagttttttctcaatttgatatttgtgcacaatgttgtgtgtctcaagtatattcttataaggacttaatattggccttgctacgtgatgctattggtgagggttctgtgcgtagagaacttcatgccaatgaattagctgatatgcttcgcaaaactctattgccccgaaggtaccttatccttgttgatgacgtgtgggaaaatagtgtttgggatgatttaagaggttgttttccagatgtcaataacagaagcagaatcattctaacaacaagacatcatgaagttgccaaatatgctagtgttcatagtgatccccttcatcttcgtatgtttgacgaagttgaaagttggaagttgcttgaaaagaaagtgtttggtgaagaaagctgttcccctctcctaaaaaatgttgggctaagaatagcaaaaatgtgtggacaactacctctttcaattgttctggtggctggtattctgtcagagatggaaaaggaagtagaatgttgggaacaagtggccaacaatttgggttcctacattcacaatgactcaagagccattgtagacaaaagttatcatgttttaccttgtcatcttaagtcttgcttcctttattttggagcatttttagaagatagagtgattgacatttcaaggttaataaggctatggatatcagaagcatttataaaaagtagtgaaggcaggaggttggaggatatagcagaaggttacttggagaatcttattggaagaaatctagtaatggttactcagaggtccatttcagatggtaaggcgaaagaatgtcgccttcatgatgtattactcgacttctgcaaggaaagagcagctgaggagaattttctactatggataaataggtaatatgataagtaactgtactttcaatcaatcaagtatttcaagttatatctgaaaattaatgatatgattttgctaattgatatattcagggatcagattaccaaaccttcttcctgtgtttactctcacaagcagcatgctcacttggccttcactgaaatgcataatcttgtagaatggagtgcgtcttgctcatttgttggctcggtagtactttccaataaatatgactcatacttttccactcgtgacatatcctcactacatgatttttcaatttcacgcattttaccaaatttcaagtttctaaaagtgttagatttggaacaccgggtttttattgattttattccaactgagcttgtttacttgaagtatttttctgcacacattgaacagaattcaattccttcaagcatatccaatctttggaaccttgaaactcttatattaaaaagtccaatatatgcgttacgttgcacgctactactacctagtacagtttgggatatggttaaattgagacatctgtatattcctgacttcagcacaaggattgaagcagcattacttgagaactctgcaaaactttataatttggaaaccctttccactctatatttctctcgtgttgaggatgcagaattgatgctgagaaaaacacctaatcttcgaaaactgatatgtgaagttgaatgtttagaatacccccctcagtaccatgtgttgaattttccaatacggcttgaaatactaaagctttatcgatcaaaatttaaaaccatccccttttgcatctctgcaccaaatctcaaatacttgaaactctgtggcttttccctggattctcagtacttatcagaaactgctgatcatctcaagcaccttgaggtactcatactgtacaaggttgaatttggtgatcatagggaatggaaagtgagcaatggcaagttccctcaactcaaaatcttgaaactagaatatttgtccttggtgaaatggattgtagctgatgatgcctttcctaaccttgaacaattggttttgcgtggatgtcaagatcttatggagatcccttcttgtttcatggacatcctttctctcaagtacatcggggtagaatactgcaatgagtcggttgtcaagtcagccttgaatatacaagaaacacaagtcgaagattatcaaaatactaatttcaagctcgttctcatcgaggtacactactgaaaaaagctttattctgcatgattttgatgaatcagaaatcgcctaaattttacaaactgttttctcagttatctttacctcgtggcctcgttttacatttgggttcttctcttagttttctttgcagaaaaaggcgtggaaattaaatttaactgatgcggaagatatgcacaatgcagtaaaaaatattcttgcagaaataagatag

SEQ ID NO: 57 - DNA, 627 bp, Artificial Sequence
  cDNA
atgggcttaatgcaccgcgtattgctgcttgcgacgtttgccctgttgtgtatgcatgcaaaagctgccggattcgaccacgacaaggttccaaggactgttgaacgaggtggcggtgcaagacaactgcgcacggccacgatgagcgacgacgaagctagagtgtcgaaattgccgtcgtttatcgagtccttcgttaaaaaccgaaaaatcgagtcttggattcagaacaaagttactgacgactttgtcctgagcgagctaaaactcgtgagattgcccggaacgagcctggcggacgacccaaatttcaagctctttcaaaagtttaagattggcggctggctcgaggaaaaggctactacaacgaaagcctgggaaaaccttggcttggattcactcccatttgatcaagtgagcaagatcgacgagttcaagacttatacgcagtatgtgacggtgcttaacaagaaggcaagcaaactcgatattgatcagtggcacgggctgttaagtggaggatcacctgaggaattgatggccaaagcaatgatattgaggactttgggcagagatgttctagagcgcagagtcatgcttggtggacatgttgtggtaccattttaa

SEQ ID NO: 58 - protein, 208 aa, Phytophthora infestans
MGLMHRVLLLATFALLCMHAKAAGFDHDKVPRTVERGGGARQLRTATMSDDEARVSKLPSFIESFVKNRKIESWIQNKVTDDFVLSELKLVRLPGTSLADDPNFKLFQKFKIGGWLEEKATTTKAWENLGLDSLPFDQVSKIDEFKTYTQYVTVLNKKASKLDIDQWHGLLSGGSPEELMAKAMILRTLGRDVLERRVMLGGHVVVPF

SEQ ID NO: 59 - DNA, 3804 bp, Artificial Sequence
  cDNA
atggaaaaacgaaaagataatgaagaagcaaacaactcattggagtcattttctgctcttcgcaaggatgctgccaatgttctggatttcctagagagattaaagaatgaagaagatcaaaaggctgttgatgtggatctgattgaaagcctgaaattgaagctgacatttatttgtacatatgtccagctttcttattccgatttggagaagtttgaagatataatgactagaaaaagacaagaggttgagaatctgcttcaaccaattttggatgatgatggcaaagacgtcgggtgtaaatatgtccttactagcctcgccggtaatatggatgactgtataagcttgtatcatcgttctaaatcagatgccaccatgatggatgagcaattgggcttcctcctcttgaatctctctcatctatccaagcatcgtgctgaaaagatgtttcctggagtgactcaatatgaggttcttcagaatgtatgtggcaacataagagatttccatggattgatagtgaattgttgcattaagcatgagatggttgagaatgtcttatctctgtttcaactgatggctgagagagtaggacgcttcctttgggaggatcaggctgatgaagactctcaactctccgagctagatgaggatgatcagaatgataaagaccctcaactcttcaagctagcacatctactcttgaagattgttccaactgaattggaggttatgcacatatgttataaaactttgaaagcttcaacttcaacagaaattggacgcttcattaagaagctcctggaaacctctccggacattctcagagaatatctgattcatctacaagagcatatgataactgttattacccctaacacttcaggggctcgaaacattcatgtcatgatggaattcctattgattattctttctgatatgccgcccaaggactttattcatcatgacaaactttttgatctcttggctcgtgttgtagcacttaccagggaggtatcaactcttgtacgcgacttggaagagaaattaaggattaaagagagtactgacgaaacaaattgtgcaaccctaaagtttctggaaaatattgaactccttaaggaagatctcaaacatgtttatctgaaagtcccggattcatctcaatattgcttccccatgagtgatggacctctcttcatgcatctgctacagagacacttagatgatttgctggattccaatgcttattcaattgctttgataaaggaacaaattgggctggtgaaagaagacttggaattcataagatcttttttcgcgaatattgagcaaggattgtataaagatctctgggaacgtgttctagatgtggcatatgaggcaaaagatgtcatagattcaattattgttcgagataatggtctcttacatcttattttctcacttcccattaccagaaagaagatgatgcttatcaaagaagaggtctctgatttacatgagaacatttccaagaacagaggtctcatcgttgtgaactctcccaagaaaccagttgagagcaagtcattgacaactgataaaataattgtaggttttggtgaggagacaaacttgatacttagaaagctcaccagtggaccggcagatctagatgtcatttcgatcattggtatgccgggtttaggtaaaactactttggcgtacaaagtatacaatgataaatcagtttctagccatttcgaccttcgtgcatggtgcacggtcgaccaagtatatgacgagaagaagttgttggataaaattttcaatcaagttagtgactcaaattcaaaattgagtgagaatattgatgttgctgataaactacggaaacaattgtttggaaagaggtatcttattgtcttagatgacgtgtgggatactaatacatgggatgagctaacaagaccttttcctgatggtatgaaaggaagtagaattattttgacaactcgagaaaagaaagttgctttgcatggaaagctctacactgatcctcttaaccttcgattgctaagatcagaagaaagttgggagttattagagaaaagggcatttggaaacgagagttgccctgatgaactattggatgttggtaaagaaatagccgaaaattgtaaagggcttcctttggtggtggatctgattgctggaatcattgctgggagggaaaagaaaaagagtgtgtggcttgaagttgtaaataatttgcattcctttattttgaagaatgaagtggaagtgatgaaagttatagaaataagttatgaccacttacctgatcacctgaagccatgcttgctgtactttgcaagtgcgccgaaggactgggtaacgacaatccatgagttgaaacttatttggggttttgaaggatttgtggaaaagacagatatgaagagtctggaagaagtggtgaaaatttatttggatgatttaatttccagtagcttggtaatttgtttcaatgagataggtgattaccctacttgccaacttcatgatcttgtgcatgacttttgtttgataaaagcaagaaaggaaaagttgtgtgatcggataagttcaagtgctccatcagatttgttgccacgtcaaattagcattgattatgatgatgatgaagagcactttgggcttaattttgtcctgttcggttcaaataagaaaaggcattccggtaaacacctctattctttgaccataaatggagatgagctggacgaccatctttctgatacatttcatctaagacacttgaggcttcttagaaccttgcacctggaatcctcttttatcatggttaaagattctttgctgaatgaaatatgcatgttgaatcatttgaggtacttaagcattgggacagaagttaaatctctgcctttgtctttctcaaacctctggaatctagaaatcttgtttgtggataacaaagaatcaaccttgatactattaccgagaatttgggatcttgtaaagttgcaagtgctgttcacgactgcttgttctttctttgatatggatgcagatgaatcaatactgatagcagaggacacaaagttagagaacttgacagcattaggggaactcgtgctttcctattggaaagatacagaggatattttcaaaaggcttcccaatcttcaagtgcttcatttcaaactcaaggagtcatgggattattcaacagagcaatattggttcccgaaattggatttcctaactgaactagaaaaactcactgtagattttgaaagatcaaacacaaatgacagtgggtcctctgcagccataaatcggccatgggattttcactttccttcgagtttgaaaagattgcaattgcatgaatttcctctgacatccgattcactatcaacaatagcgagactgctgaaccttgaagagttgtacctttatcgtacaatcatccatggggaagaatggaacatgggagaagaagacacctttgagaatctcaaatgtttgatgttgagtcaagtgattctttccaagtgggaggttggagaggaatcttttcccacgcttgagaaattagaactgtcggactgtcataatcttgaggagattccgtctagttttggggatatttattccttgaaaattatcgaacttgtaaggagccctcaacttgaaaattccgctctcaagattaaggaatatgctgaagatatgaggggaggggacgagcttcagatccttggccagaaggatatcccgttatttaagtag

SEQ ID NO: 60 - protein, 1267 aa, Solanum bulbocastanum
MEKRKDNEEANNSLESFSALRKDAANVLDFLERLKNEEDQKAVDVDLIESLKLKLTFICTYVQLSYSDLEKFEDIMTRKRQEVENLLQPILDDDGKDVGCKYVLTSLAGNMDDCISLYHRSKSDATMMDEQLGFLLLNLSHLSKHRAEKMFPGVTQYEVLQNVCGNIRDFHGLIVNCCIKHEMVENVLSLFQLMAERVGRFLWEDQADEDSQLSELDEDDQNDKDPQLFKLAHLLLKIVPTELEVMHICYKTLKASTSTEIGRFIKKLLETSPDILREYLIHLQEHMITVITPNTSGARNIHVMMEFLLIILSDMPPKDFIHHDKLFDLLARVVALTREVSTLVRDLEEKLRIKESTDETNCATLKFLENIELLKEDLKHVYLKVPDSSQYCFPMSDGPLFMHLLQRHLDDLLDSNAYSIALIKEQIGLVKEDLEFIRSFFANIEQGLYKDLWERVLDVAYEAKDVIDSIIVRDNGLLHLIFSLPITRKKMMLIKEEVSDLHENISKNRGLIVVNSPKKPVESKSLTTDKIIVGFGEETNLILRKLTSGPADLDVISIIGMPGLGKTTLAYKVYNDKSVSSHFDLRAWCTVDQVYDEKKLLDKIFNQVSDSNSKLSENIDVADKLRKQLFGKRYLIVLDDVWDTNTWDELTRPFPDGMKGSRIILTTREKKVALHGKLYTDPLNLRLLRSEESWELLEKRAFGNESCPDELLDVGKEIAENCKGLPLVVDLIAGIIAGREKKKSVWLEVVNNLHSFILKNEVEVMKVIEISYDHLPDHLKPCLLYFASAPKDWVTTIHELKLIWGFEGFVEKTDMKSLEEVVKIYLDDLISSSLVICFNEIGDYPTCQLHDLVHDFCLIKARKEKLCDRISSSAPSDLLPRQISIDYDDDEEHFGLNFVLFGSNKKRHSGKHLYSLTINGDELDDHLSDTFHLRHLRLLRTLHLESSFIMVKDSLLNEICMLNHLRYLSIGTEVKSLPLSFSNLWNLEILFVDNKESTLILLPRIWDLVKLQVLFTTACSFFDMDADESILIAEDTKLENLTALGELVLSYWKDTEDIFKRLPNLQVLHFKLKESWDYSTEQYWFPKLDFLTELEKLTVDFERSNTNDSGSSAAINRPWDFHFPSSLKRLQLHEFPLTSDSLSTIARLLNLEELYLYRTIIHGEEWNMGEEDTFENLKCLMLSQVILSKWEVGEESFPTLEKLELSDCHNLEEIPSSFGDIYSLKIIELVRSPQLENSALKIKEYAEDMRGGDELQILGQKDIPLFK

SEQ ID NO: 61 - DNA, 3890 bp, Solanum bulbocastanum
atggaaaaacgaaaagataatgaagaagcaaacaactcattggtatgttatttgatagagtgaactgtaaagtattgaattgtagatatcatgtggctttaaaaatttgatatgtgttattttggcaggagtcattttctgctcttcgcaaggatgctgccaatgttctggatttcctagagagattaaagaatgaagaagatcaaaaggctgttgatgtggatctgattgaaagcctgaaattgaagctgacatttatttgtacatatgtccagctttcttattccgatttggagaagtttgaagatataatgactagaaaaagacaagaggttgagaatctgcttcaaccaattttggatgatgatggcaaagacgtcgggtgtaaatatgtccttactagcctcgccggtaatatggatgactgtataagcttgtatcatcgttctaaatcagatgccaccatgatggatgagcaattgggcttcctcctcttgaatctctctcatctatccaagcatcgtgctgaaaagatgtttcctggagtgactcaatatgaggttcttcagaatgtatgtggcaacataagagatttccatggattgatagtgaattgttgcattaagcatgagatggttgagaatgtcttatctctgtttcaactgatggctgagagagtaggacgcttcctttgggaggatcaggctgatgaagactctcaactctccgagctagatgaggatgatcagaatgataaagaccctcaactcttcaagctagcacatctactcttgaagattgttccaactgaattggaggttatgcacatatgttataaaactttgaaagcttcaacttcaacagaaattggacgcttcattaagaagctcctggaaacctctccggacattctcagagaatatctgattcatctacaagagcatatgataactgttattacccctaacacttcaggggctcgaaacattcatgtcatgatggaattcctattgattattctttctgatatgccgcccaaggactttattcatcatgacaaactttttgatctcttggctcgtgttgtagcacttaccagggaggtatcaactcttgtacgcgacttggaagagaaattaaggattaaagagagtactgacgaaacaaattgtgcaaccctaaagtttctggaaaatattgaactccttaaggaagatctcaaacatgtttatctgaaagtcccggattcatctcaatattgcttccccatgagtgatggacctctcttcatgcatctgctacagagacacttagatgatttgctggattccaatgcttattcaattgctttgataaaggaacaaattgggctggtgaaagaagacttggaattcataagatcttttttcgcgaatattgagcaaggattgtataaagatctctgggaacgtgttctagatgtggcatatgaggcaaaagatgtcatagattcaattattgttcgagataatggtctcttacatcttattttctcacttcccattaccagaaagaagatgatgcttatcaaagaagaggtctctgatttacatgagaacatttccaagaacagaggtctcatcgttgtgaactctcccaagaaaccagttgagagcaagtcattgacaactgataaaataattgtaggttttggtgaggagacaaacttgatacttagaaagctcaccagtggaccggcagatctagatgtcatttcgatcattggtatgccgggtttaggtaaaactactttggcgtacaaagtatacaatgataaatcagtttctagccatttcgaccttcgtgcatggtgcacggtcgaccaagtatatgacgagaagaagttgttggataaaattttcaatcaagttagtgactcaaattcaaaattgagtgagaatattgatgttgctgataaactacggaaacaattgtttggaaagaggtatcttattgtcttagatgacgtgtgggatactaatacatgggatgagctaacaagaccttttcctgatggtatgaaaggaagtagaattattttgacaactcgagaaaagaaagttgctttgcatggaaagctctacactgatcctcttaaccttcgattgctaagatcagaagaaagttgggagttattagagaaaagggcatttggaaacgagagttgccctgatgaactattggatgttggtaaagaaatagccgaaaattgtaaagggcttcctttggtggtggatctgattgctggaatcattgctgggagggaaaagaaaaagagtgtgtggcttgaagttgtaaataatttgcattcctttattttgaagaatgaagtggaagtgatgaaagttatagaaataagttatgaccacttacctgatcacctgaagccatgcttgctgtactttgcaagtgcgccgaaggactgggtaacgacaatccatgagttgaaacttatttggggttttgaaggatttgtggaaaagacagatatgaagagtctggaagaagtggtgaaaatttatttggatgatttaatttccagtagcttggtaatttgtttcaatgagataggtgattaccctacttgccaacttcatgatcttgtgcatgacttttgtttgataaaagcaagaaaggaaaagttgtgtgatcggataagttcaagtgctccatcagatttgttgccacgtcaaattagcattgattatgatgatgatgaagagcactttgggcttaattttgtcctgttcggttcaaataagaaaaggcattccggtaaacacctctattctttgaccataaatggagatgagctggacgaccatctttctgatacatttcatctaagacacttgaggcttcttagaaccttgcacctggaatcctcttttatcatggttaaagattctttgctgaatgaaatatgcatgttgaatcatttgaggtacttaagcattgggacagaagttaaatctctgcctttgtctttctcaaacctctggaatctagaaatcttgtttgtggataacaaagaatcaaccttgatactattaccgagaatttgggatcttgtaaagttgcaagtgctgttcacgactgcttgttctttctttgatatggatgcagatgaatcaatactgatagcagaggacacaaagttagagaacttgacagcattaggggaactcgtgctttcctattggaaagatacagaggatattttcaaaaggcttcccaatcttcaagtgcttcatttcaaactcaaggagtcatgggattattcaacagagcaatattggttcccgaaattggatttcctaactgaactagaaaaactcactgtagattttgaaagatcaaacacaaatgacagtgggtcctctgcagccataaatcggccatgggattttcactttccttcgagtttgaaaagattgcaattgcatgaatttcctctgacatccgattcactatcaacaatagcgagactgctgaaccttgaagagttgtacctttatcgtacaatcatccatggggaagaatggaacatgggagaagaagacacctttgagaatctcaaatgtttgatgttgagtcaagtgattctttccaagtgggaggttggagaggaatcttttcccacgcttgagaaattagaactgtcggactgtcataatcttgaggagattccgtctagttttggggatatttattccttgaaaattatcgaacttgtaaggagccctcaacttgaaaattccgctctcaagattaaggaatatgctgaagatatgaggggaggggacgagcttcagatccttggccagaaggatatcccgttatttaagtag

SEQ ID NO: 62 - DNA, 279 bp, Artificial Sequence
  cDNA
cttgcctttgcggttttagctaggagcagcgccgtcgcagcattcccaatccccgacgagtctcgccccttgtcgaagacatctcctgacactgtggccccaagatcgcttcggatcgaggcccaagaagttattcagagcggccggggagacggatatggtgggttctggaaaaacgtagcccagagtactaacaagatcgtcaagaggccggatatcaagataggcaaacttatcgaggcggccaagaaggcaaaagcaaaaatgacgaagtcctga

SEQ ID NO: 63 - protein, 92 aa, Phytophthora infestans
LAFAVLARSSAVAAFPIPDESRPLSKTSPDTVAPRSLRIEAQEVIQSGRGDGYGGFWKNVAQSTNKIVKRPDIKIGKLIEAAKKAKAKMTKS

SEQ ID NO: 64 - DNA, 2913 bp, Artificial Sequence
  cDNA
atggctgaagctttcattcaagttctgctagacaatctcacttctttcctcaaaggggaacttgtattgcttttcggttttcaagatgagttccaaaggctttcaagcatgttttctacaattcaagccgtccttgaagatgctcaggagaagcaactcaacaacaagcctctagaaaattggttgcaaaaactcaatgctgctacatatgaagtcgatgacatcttggatgaatataaaaccaaggccacaagattctcccagtctgaatatggccgttatcatccaaaggttatccctttccgtcacaaggtcgggaaaaggatggaccaagtgatgaaaaaactaaaggcaattgctgaggaaagaaagaattttcatttgcacgaaaaaattgtagagagacaagctgttagacgggaaacaggttctgtattaaccgaaccgcaggtttatggaagagacaaagagaaagatgagatagtgaaaatcctaataaacaatgttagtgatgcccaacacctttcagtcctcccaatacttggtatggggggattaggaaaaacgactcttgcccaaatggtcttcaatgaccagagagttactgagcatttccattccaaaatatggatttgtgtctcggaagattttgatgagaagaggttaataaaggcaattgtagaatctattgaaggaaggccactacttggtgagatggacttggctccacttcaaaagaagcttcaggagttgctgaatggaaaaagatacttgcttgtcttagatgatgtttggaatgaagatcaacagaagtgggctaatttaagagcagtcttgaaggttggagcaagtggtgcttctgttctaaccactactcgtcttgaaaaggttggatcaattatgggaacattgcaaccatatgaactgtcaaatctgtctcaagaagattgttggttgttgttcatgcaacgtgcatttggacaccaagaagaaataaatccaaaccttgtggcaatcggaaaggagattgtgaaaaaaagtggtggtgtgcctctagcagccaaaactcttggaggtattttgtgcttcaagagagaagaaagagcatgggaacatgtgagagacagtccgatttggaatttgcctcaagatgaaagttctattctgcctgccctgaggcttagttaccatcaacttccacttgatttgaaacaatgctttgcgtattgtgcggtgttcccaaaggatgccaaaatggaaaaagaaaagctaatctctctctggatggcgcatggttttcttttatcaaaaggaaacatggagctagaggatgtgggcgatgaagtatggaaagaattatacttgaggtcttttttccaagagattgaagttaaagatggtaaaacttatttcaagatgcatgatctcatccatgatttggcaacatctctgttttcagcaaacacatcaagcagcaatatccgtgaaataaataaacacagttacacacatatgatgtccattggtttcgccgaagtggtgtttttttacactcttccccccttggaaaagtttatctcgttaagagtgcttaatctaggtgattcgacatttaataagttaccatcttccattggagatctagtacatttaagatacttgaacctgtatggcagtggcatgcgtagtcttccaaagcagttatgcaagcttcaaaatctgcaaactcttgatctacaatattgcaccaagctttgttgtttgccaaaagaaacaagtaaacttggtagtctccgaaatcttttacttgatggtagccagtcattgacttgtatgccaccaaggataggatcattgacatgccttaagactctaggtcaatttgttgttggaaggaagaaaggttatcaacttggtgaactaggaaacctaaatctctatggctcaattaaaatctcgcatcttgagagagtgaagaatgataaggacgcaaaagaagccaatttatctgcaaaagggaatctgcattctttaagcatgagttggaataactttggaccacatatatatgaatcagaagaagttaaagtgcttgaagccctcaaaccacactccaatctgacttctttaaaaatctatggcttcagaggaatccatctcccagagtggatgaatcactcagtattgaaaaatattgtctctattctaattagcaacttcagaaactgctcatgcttaccaccctttggtgatctgccttgtctagaaagtctagagttacactgggggtctgcggatgtggagtatgttgaagaagtggatattgatgttcattctggattccccacaagaataaggtttccatccttgaggaaacttgatatatgggactttggtagtctgaaaggattgctgaaaaaggaaggagaagagcaattccctgtgcttgaagagatgataattcacgagtgcccttttctgaccctttcttctaatcttagggctcttacttccctcagaatttgctataataaagtagctacttcattcccagaagagatgttcaaaaaccttgcaaatctcaaatacttgacaatctctcggtgcaataatctcaaagagctgcctaccagcttggctagtctgaatgctttgaaaagtctaaaaattcaattgtgttgcgcactagagagtctccctgaggaagggctggaaggtttatcttcactcacagagttatttgttgaacactgtaacatgctaaaatgtttaccagagggattgcagcacctaacaaccctcacaagtttaaaaattcggggatgtccacaactgatcaagcggtgtgagaagggaataggagaagactggcacaaaatttctcacattcctaatgtgaatatatatatttaa

SEQ ID NO: 65 - protein, 970 aa, Solanum bulbocastanum
MAEAFIQVLLDNLTSFLKGELVLLFGFQDEFQRLSSMFSTIQAVLEDAQEKQLNNKPLENWLQKLNAATYEVDDILDEYKTKATRFSQSEYGRYHPKVIPFRHKVGKRMDQVMKKLKAIAEERKNFHLHEKIVERQAVRRETGSVLTEPQVYGRDKEKDEIVKILINNVSDAQHLSVLPILGMGGLGKTTLAQMVFNDQRVTEHFHSKIWICVSEDFDEKRLIKAIVESIEGRPLLGEMDLAPLQKKLQELLNGKRYLLVLDDVWNEDQQKWANLRAVLKVGASGASVLTTTRLEKVGSIMGTLQPYELSNLSQEDCWLLFMQRAFGHQEEINPNLVAIGKEIVKKSGGVPLAAKTLGGILCFKREERAWEHVRDSPIWNLPQDESSILPALRLSYHQLPLDLKQCFAYCAVFPKDAKMEKEKLISLWMAHGFLLSKGNMELEDVGDEVWKELYLRSFFQEIEVKDGKTYFKMHDLIHDLATSLFSANTSSSNIREINKHSYTHMMSIGFAEVVFFYTLPPLEKFISLRVLNLGDSTFNKLPSSIGDLVHLRYLNLYGSGMRSLPKQLCKLQNLQTLDLQYCTKLCCLPKETSKLGSLRNLLLDGSQSLTCMPPRIGSLTCLKTLGQFVVGRKKGYQLGELGNLNLYGSIKISHLERVKNDKDAKEANLSAKGNLHSLSMSWNNFGPHIYESEEVKVLEALKPHSNLTSLKIYGFRGIHLPEWMNHSVLKNIVSILISNFRNCSCLPPFGDLPCLESLELHWGSADVEYVEEVDIDVHSGFPTRIRFPSLRKLDIWDFGSLKGLLKKEGEEQFPVLEEMIIHECPFLTLSSNLRALTSLRICYNKVATSFPEEMFKNLANLKYLTISRCNNLKELPTSLASLNALKSLKIQLCCALESLPEEGLEGLSSLTELFVEHCNMLKCLPEGLQHLTTLTSLKIRGCPQLIKRCEKGIGEDWHKISHIPNVNIYI

SEQ ID NO: 66 - DNA, 3592 bp, Solanum bulbocastanum
atggctgaagctttcattcaagttctgctagacaatctcacttctttcctcaaaggggaacttgtattgcttttcggttttcaagatgagttccaaaggctttcaagcatgttttctacaattcaagccgtccttgaagatgctcaggagaagcaactcaacaacaagcctctagaaaattggttgcaaaaactcaatgctgctacatatgaagtcgatgacatcttggatgaatataaaaccaaggccacaagattctcccagtctgaatatggccgttatcatccaaaggttatccctttccgtcacaaggtcgggaaaaggatggaccaagtgatgaaaaaactaaaggcaattgctgaggaaagaaagaattttcatttgcacgaaaaaattgtagagagacaagctgttagacgggaaacaggtactcatcttaaattagtattacaacaactaagtttatattcatttttttggcaattatcaaattcagaaaagggttaaatatactcatgtcctatcgtaaatagtgtatatatacctctcgttgtactttcgatctgaatatacttgtcaaatctggcaagctcagaatcaaattatccaccccaacttttaaatactcgatatctttagaaatccacctgtctaactcatccactacccattccctttgctttgaattcttttctttacctataaacttggaacactcgatccgttttgcttttcttaacaaagcagctcagagaaaagaggttttcttctattctgtttctctgtgtgctgcacttgggtccttaatcccattaaaaacagggcatgttaatcccaacgacggtagcctttcctgacagctgactgtaaattttgtctaacaaagaaaaaaaaagattagacatgtttttccttgtcattgattaggctggatttctttcagagtggaacataggggatatattggaccaaaagtagaatgggtatatatttaaagtatttctgatagaacaggagtatattgtgcgaaaatatcctctattttctgttgtctcctaatgagtttgaatgtaataatattctcatgtggacattgcttgcaccaggttctgtattaaccgaaccgcaggtttatggaagagacaaagagaaagatgagatagtgaaaatcctaataaacaatgttagtgatgcccaacacctttcagtcctcccaatacttggtatggggggattaggaaaaacgactcttgcccaaatggtcttcaatgaccagagagttactgagcatttccattccaaaatatggatttgtgtctcggaagattttgatgagaagaggttaataaaggcaattgtagaatctattgaaggaaggccactacttggtgagatggacttggctccacttcaaaagaagcttcaggagttgctgaatggaaaaagatacttgcttgtcttagatgatgtttggaatgaagatcaacagaagtgggctaatttaagagcagtcttgaaggttggagcaagtggtgcttctgttctaaccactactcgtcttgaaaaggttggatcaattatgggaacattgcaaccatatgaactgtcaaatctgtctcaagaagattgttggttgttgttcatgcaacgtgcatttggacaccaagaagaaataaatccaaaccttgtggcaatcggaaaggagattgtgaaaaaaagtggtggtgtgcctctagcagccaaaactcttggaggtattttgtgcttcaagagagaagaaagagcatgggaacatgtgagagacagtccgatttggaatttgcctcaagatgaaagttctattctgcctgccctgaggcttagttaccatcaacttccacttgatttgaaacaatgctttgcgtattgtgcggtgttcccaaaggatgccaaaatggaaaaagaaaagctaatctctctctggatggcgcatggttttcttttatcaaaaggaaacatggagctagaggatgtgggcgatgaagtatggaaagaattatacttgaggtcttttttccaagagattgaagttaaagatggtaaaacttatttcaagatgcatgatctcatccatgatttggcaacatctctgttttcagcaaacacatcaagcagcaatatccgtgaaataaataaacacagttacacacatatgatgtccattggtttcgccgaagtggtgtttttttacactcttccccccttggaaaagtttatctcgttaagagtgcttaatctaggtgattcgacatttaataagttaccatcttccattggagatctagtacatttaagatacttgaacctgtatggcagtggcatgcgtagtcttccaaagcagttatgcaagcttcaaaatctgcaaactcttgatctacaatattgcaccaagctttgttgtttgccaaaagaaacaagtaaacttggtagtctccgaaatcttttacttgatggtagccagtcattgacttgtatgccaccaaggataggatcattgacatgccttaagactctaggtcaatttgttgttggaaggaagaaaggttatcaacttggtgaactaggaaacctaaatctctatggctcaattaaaatctcgcatcttgagagagtgaagaatgataaggacgcaaaagaagccaatttatctgcaaaagggaatctgcattctttaagcatgagttggaataactttggaccacatatatatgaatcagaagaagttaaagtgcttgaagccctcaaaccacactccaatctgacttctttaaaaatctatggcttcagaggaatccatctcccagagtggatgaatcactcagtattgaaaaatattgtctctattctaattagcaacttcagaaactgctcatgcttaccaccctttggtgatctgccttgtctagaaagtctagagttacactgggggtctgcggatgtggagtatgttgaagaagtggatattgatgttcattctggattccccacaagaataaggtttccatccttgaggaaacttgatatatgggactttggtagtctgaaaggattgctgaaaaaggaaggagaagagcaattccctgtgcttgaagagatgataattcacgagtgcccttttctgaccctttcttctaatcttagggctcttacttccctcagaatttgctataataaagtagctacttcattcccagaagagatgttcaaaaaccttgcaaatctcaaatacttgacaatctctcggtgcaataatctcaaagagctgcctaccagcttggctagtctgaatgctttgaaaagtctaaaaattcaattgtgttgcgcactagagagtctccctgaggaagggctggaaggtttatcttcactcacagagttatttgttgaacactgtaacatgctaaaatgtttaccagagggattgcagcacctaacaaccctcacaagtttaaaaattcggggatgtccacaactgatcaagcggtgtgagaagggaataggagaagactggcacaaaatttctcacattcctaatgtgaatatatatatttaa

SEQ ID NO: 67 - DNA, 459 bp, Artificial Sequence
  cDNA
atgcgttcgctcctgttgaccgtgcttttgaacctggtcgtgcttctagcaaccactggggcagtttcatccaatctcaacaccgccgtgaattacgcttccacatccaagattcgctttctgtcgactgagtacaacgccgatgaaaaaagaagcttgcgaggtgactacaacaatgaggtcacaaaagagcccaacacgtctgacgaagagcgggcgttttctatctcaaagtctgcggaatacgtgaagatggtactttatggattcaaacttggattttctcctcgcactcagtccaagacggtgttgcgatacgaagataaactgtttacggctctctataaatccggagagacgccgagaagcctaaggaccaagcatctcgataaggcttccgctagcgtatttttcaacagattcaaaaaatggtacgataaaaacgttggccctagctag

SEQ ID NO: 68 - protein, 152 aa, Phytophthora infestans
MRSLLLTVLLNLVVLLATTGAVSSNLNTAVNYASTSKIRFLSTEYNADEKRSLRGDYNNEVTKEPNTSDEERAFSISKSAEYVKMVLYGFKLGFSPRTQSKTVLRYEDKLFTALYKSGETPRSLRTKHLDKASASVFFNRFKKWYDKNVGPS

SEQ ID NO: 69 - DNA, 2913 bp, Artificial Sequence
  cDNA
atggctgaagctttcattcaagttctgttagacaatctcacttctttcctcaaaggggaacttacattgcttttcggttttcaagatgagttccaaaggctttcaagcatgttttctacaatccaagccgtccttgaagatgctcaggagaagcaactcaacaacaagcctctagaaaattggttgcaaaaactcaatgctgctacatacgaagtcgatgacatcttggatgaatataaaaccaaggccacaagattctcccagtctgaatatggccgttatcatccaaaggttatccctttccgtcacaaggtcgggaaaaggatggaccaagtgatgaaaaaactaaaggcaattgctgaggaaagaaagaattttcatttgcacgaaaaaattgtagagagacaagctgttagacgggaaacaggttctgtattaaccgaaccgcaggtttatggaagagacaaagagaaagatgagatagtgaaaatcctaataaacaatgttagtgatgcccaacacctttcagtcctcccaatacttggtatggggggattaggaaaaacgactcttgcccaaatggtcttcaatgaccagagagttactgagcatttccattccaaaatatggatttgtgtctcggaagattttgatgagaagaggttaataaaggcaattgtagaatctattgaaggaaggccactacttggtgagatggacttggctccacttcaaaagaagcttcaggagttgctgaatggaaaaagatacttgcttgtcttagatgatgtttggaatgaagatcaacagaagtgggctaatttaagagcagtcttgaaggttggagcaagtggtgcttctgttctaaccactactcgtcttgaaaaggttggatcaattatgggaacattgcaaccatatgaactgtcaaatctgtctcaagaagattgttggttgttgttcatgcaacgtgcatttggacaccaagaagaaataaatccaaaccttgtggcaatcggaaaggagattgtgaaaaaaagtggtggtgtgcctctagcagccaaaactcttggaggtattttgtgcttcaagagagaagaaagagcatgggaacatgtgagagacagtccgatttggaatttgcctcaagatgaaagttctattctgcctgccctgaggcttagttaccatcaacttccacttgatttgaaacaatgctttgcgtattgtgcggtgttcccaaaggatgccaaaatggaaaaagaaaagctaatctctctctggatggcgcatggttttcttttatcaaaaggaaacatggagctagaggatgtgggcgatgaagtatggaaagaattatacttgaggtcttttttccaagagattgaagttaaagatggtaaaacttatttcaagatgcatgatctcatccatgatttggcaacatctctgttttcagcaaacacatcaagcagcaatatccgtgaaataaataaacacagttacacacatatgatgtccattggtttcgccgaagtggtgtttttttacactcttccccccttggaaaagtttatctcgttaagagtgcttaatctaggtgattcgacatttaataagttaccatcttccattggagatctagtacatttaagatacttgaacctgtatggcagtggcatgcgtagtcttccaaagcagttatgcaagcttcaaaatctgcaaactcttgatctacaatattgcaccaagctttgttgtttgccaaaagaaacaagtaaacttggtagtctccgaaatcttttacttgatggtagccagtcattgacttgtatgccaccaaggataggatcattgacatgccttaagactctaggtcaatttgttgttggaaggaagaaaggttatcaacttggtgaactaggaaacctaaatctctatggctcaattaaaatctcgcatcttgagagagtgaagaatgatagggacgcaaaagaagccaatttatctgcaaaagggaatctgcattctttaagcatgagttggaataactttggaccacatatatatgaatcagaagaagttaaagtgcttgaagccctcaaaccacactccaatctgacttctttaaaaatctatggcttcagaggaatccatctcccagagtggatgaatcactcagtattgaaaaatattgtctctattctaattagcaacttcagaaactgctcatgcttaccaccctttggtgatctgccttgtctagaaagtctagagttacactgggggtctgcggatgtggagtatgttgaagaagtggatattgatgttcattctggattccccacaagaataaggtttccatccttgaggaaacttgatatatgggactttggtagtctgaaaggattgctgaaaaaggaaggagaagagcaattccctgtgcttgaagagctgataattcacgagtgcccttttctgaccctttcttctaatcttagggctcttacttccctcagaatttgctataataaagtagctacttcattcccagaagagatgttcaaaaaccttgcaaatctcaaatacttgacaatctctcggtgcaataatctcaaagagctgcctaccagcttggctagtctgaatgctttgaaaagtctaaaaattcaattgtgttgcgcactagagagtctccctgaggaagggctggaaggtttatcttcactcacagagttatttgttgaacactgtaacatgctaaaatgtttaccagagggattgcagcacctaacaaccctcacaagtttaaaaattcggggatgtccacaactgatcaagcggtgtgagaagggaataggagaagactggcacaaaatttctcacattcctaatgtgaatatatataattaa

SEQ ID NO: 70 - protein, 970 aa, Solanum stoloniferum
MAEAFIQVLLDNLTSFLKGELTLLFGFQDEFQRLSSMFSTIQAVLEDAQEKQLNNKPLENWLQKLNAATYEVDDILDEYKTKATRFSQSEYGRYHPKVIPFRHKVGKRMDQVMKKLKAIAEERKNFHLHEKIVERQAVRRETGSVLTEPQVYGRDKEKDEIVKILINNVSDAQHLSVLPILGMGGLGKTTLAQMVFNDQRVTEHFHSKIWICVSEDFDEKRLIKAIVESIEGRPLLGEMDLAPLQKKLQELLNGKRYLLVLDDVWNEDQQKWANLRAVLKVGASGASVLTTTRLEKVGSIMGTLQPYELSNLSQEDCWLLFMQRAFGHQEEINPNLVAIGKEIVKKSGGVPLAAKTLGGILCFKREERAWEHVRDSPIWNLPQDESSILPALRLSYHQLPLDLKQCFAYCAVFPKDAKMEKEKLISLWMAHGFLLSKGNMELEDVGDEVWKELYLRSFFQEIEVKDGKTYFKMHDLIHDLATSLFSANTSSSNIREINKHSYTHMMSIGFAEVVFFYTLPPLEKFISLRVLNLGDSTFNKLPSSIGDLVHLRYLNLYGSGMRSLPKQLCKLQNLQTLDLQYCTKLCCLPKETSKLGSLRNLLLDGSQSLTCMPPRIGSLTCLKTLGQFVVGRKKGYQLGELGNLNLYGSIKISHLERVKNDRDAKEANLSAKGNLHSLSMSWNNFGPHIYESEEVKVLEALKPHSNLTSLKIYGFRGIHLPEWMNHSVLKNIVSILISNFRNCSCLPPFGDLPCLESLELHWGSADVEYVEEVDIDVHSGFPTRIRFPSLRKLDIWDFGSLKGLLKKEGEEQFPVLEELIIHECPFLTLSSNLRALTSLRICYNKVATSFPEEMFKNLANLKYLTISRCNNLKELPTSLASLNALKSLKIQLCCALESLPEEGLEGLSSLTELFVEHCNMLKCLPEGLQHLTTLTSLKIRGCPQLIKRCEKGIGEDWHKISHIPNVNIYN

SEQ ID NO: 71 - DNA, 3592 bp, Solanum stoloniferum
atggctgaagctttcattcaagttctgttagacaatctcacttctttcctcaaaggggaacttacattgcttttcggttttcaagatgagttccaaaggctttcaagcatgttttctacaatccaagccgtccttgaagatgctcaggagaagcaactcaacaacaagcctctagaaaattggttgcaaaaactcaatgctgctacatacgaagtcgatgacatcttggatgaatataaaaccaaggccacaagattctcccagtctgaatatggccgttatcatccaaaggttatccctttccgtcacaaggtcgggaaaaggatggaccaagtgatgaaaaaactaaaggcaattgctgaggaaagaaagaattttcatttgcacgaaaaaattgtagagagacaagctgttagacgggaaacaggtactcatcttaaattagtattacaacaactaagtttatattcatttttttggcaattatcaaattcagaaaagggttaaatatactcatgtcctatcgtaaatagtgtaaatatacctctcgttgtactttcgatctgaatatacttgtcaaatctggcaagctcagaatcaaattatccaccccaacttttaaatactcgacatctttagaaatccacctgtctaactcatccactacccattccctttgctttgaattcttttctttacctataaacttggaacactcgatccgttttgcttttcttaacaaagcagctcagagaaaagaggttttcttctattctgtttctctgtgtgctgcacttgggtccttaatcccattaaaaacagggcatgttaatcccaacgacggtagcctttcctgacagctgactgtaaattttgtctaacaaagaaaaaaaaagattagacatgtttttccttgtcattgattaggctggatttctttcagagtggaacataggggatatattggaccaaaaatagaatgggtatatatttaaagtatttctgatagaacaggagtatattgtgcgaaaatatcctctattttctgttgtctcctaatgagtttgaatgtaataatattctcatgtggacattgcttgcaccaggttctgtattaaccgaaccgcaggtttatggaagagacaaagagaaagatgagatagtgaaaatcctaataaacaatgttagtgatgcccaacacctttcagtcctcccaatacttggtatggggggattaggaaaaacgactcttgcccaaatggtcttcaatgaccagagagttactgagcatttccattccaaaatatggatttgtgtctcggaagattttgatgagaagaggttaataaaggcaattgtagaatctattgaaggaaggccactacttggtgagatggacttggctccacttcaaaagaagcttcaggagttgctgaatggaaaaagatacttgcttgtcttagatgatgtttggaatgaagatcaacagaagtgggctaatttaagagcagtcttgaaggttggagcaagtggtgcttctgttctaaccactactcgtcttgaaaaggttggatcaattatgggaacattgcaaccatatgaactgtcaaatctgtctcaagaagattgttggttgttgttcatgcaacgtgcatttggacaccaagaagaaataaatccaaaccttgtggcaatcggaaaggagattgtgaaaaaaagtggtggtgtgcctctagcagccaaaactcttggaggtattttgtgcttcaagagagaagaaagagcatgggaacatgtgagagacagtccgatttggaatttgcctcaagatgaaagttctattctgcctgccctgaggcttagttaccatcaacttccacttgatttgaaacaatgctttgcgtattgtgcggtgttcccaaaggatgccaaaatggaaaaagaaaagctaatctctctctggatggcgcatggttttcttttatcaaaaggaaacatggagctagaggatgtgggcgatgaagtatggaaagaattatacttgaggtcttttttccaagagattgaagttaaagatggtaaaacttatttcaagatgcatgatctcatccatgatttggcaacatctctgttttcagcaaacacatcaagcagcaatatccgtgaaataaataaacacagttacacacatatgatgtccattggtttcgccgaagtggtgtttttttacactcttccccccttggaaaagtttatctcgttaagagtgcttaatctaggtgattcgacatttaataagttaccatcttccattggagatctagtacatttaagatacttgaacctgtatggcagtggcatgcgtagtcttccaaagcagttatgcaagcttcaaaatctgcaaactcttgatctacaatattgcaccaagctttgttgtttgccaaaagaaacaagtaaacttggtagtctccgaaatcttttacttgatggtagccagtcattgacttgtatgccaccaaggataggatcattgacatgccttaagactctaggtcaatttgttgttggaaggaagaaaggttatcaacttggtgaactaggaaacctaaatctctatggctcaattaaaatctcgcatcttgagagagtgaagaatgatagggacgcaaaagaagccaatttatctgcaaaagggaatctgcattctttaagcatgagttggaataactttggaccacatatatatgaatcagaagaagttaaagtgcttgaagccctcaaaccacactccaatctgacttctttaaaaatctatggcttcagaggaatccatctcccagagtggatgaatcactcagtattgaaaaatattgtctctattctaattagcaacttcagaaactgctcatgcttaccaccctttggtgatctgccttgtctagaaagtctagagttacactgggggtctgcggatgtggagtatgttgaagaagtggatattgatgttcattctggattccccacaagaataaggtttccatccttgaggaaacttgatatatgggactttggtagtctgaaaggattgctgaaaaaggaaggagaagagcaattccctgtgcttgaagagctgataattcacgagtgcccttttctgaccctttcttctaatcttagggctcttacttccctcagaatttgctataataaagtagctacttcattcccagaagagatgttcaaaaaccttgcaaatctcaaatacttgacaatctctcggtgcaataatctcaaagagctgcctaccagcttggctagtctgaatgctttgaaaagtctaaaaattcaattgtgttgcgcactagagagtctccctgaggaagggctggaaggtttatcttcactcacagagttatttgttgaacactgtaacatgctaaaatgtttaccagagggattgcagcacctaacaaccctcacaagtttaaaaattcggggatgtccacaactgatcaagcggtgtgagaagggaataggagaagactggcacaaaatttctcacattcctaatgtgaatatatataattaa

SEQ ID NO: 72 - DNA, 2913 bp, Artificial Sequence
  cDNA
atggctgaagctttcattcaagttctgttagacaatctcacttctttcctcaaaggggaacttacattgcttttcggttttcaagatgagttccaaaggctttcaagcatgttttctacaatccaagccgtccttgaagatgctcaggagaagcaactcaacaacaagcctctagaaaattggttgcaaaaactcaatgctgctacatacgaagtcgatgacatcttggatgaatataaaaccaaggccacaagattctcccagtctgaatatggccgttatcatccaaaggttatccctttccgtcacaaggtcgggaaaaggatggaccaagtgatgaaaaaactaaaggcaattgctgaggaaagaaagaattttcatttgcacgaaaaaattgtagagagacaagctgttagacgggaaacaggttctgtattaaccgaaccgcaggtttatggaagagacaaagagaaagatgagatagtgaaaatcctaataaacaatgttagtgatgcccaacacctttcagtcctcccaatacttggtatggggggattaggaaaaacgactcttgcccaaatggtcttcaatgaccagagagttactgagcatttccattccaaaatatggatttgtgtctcggaagattttgatgagaagaggttaataaaggcaattgtagaatctattgaaggaaggccactacttggtgagatggacttggctccacttcaaaagaagcttcaggagttgctgaatggaaaaagatacttgcttgtcttagatgatgtttggaatgaagatcaacagaagtgggcaaatttaagagcagtcttgaaggttggagcaagtggtgcttctgttctaaccactactcgtcttgaaaaggttggatcaattatgggaacattgcaaccatatgaactgtcaaatctgtctcaagaagattgttggttgttgttcatgcaacgtgcatttggacaccaagaagaaataaatccaaaccttgtggcaatcggaaaggagattgtgaaaaaaagtggtggtgtgcctctagcagccaaaactcttggaggtattttgtgcttcaagagagaagaaagagcatgggaacatgtgagagacagtccgatttggaatttgcctcaagatgaaagttctattctgcctgccctgaggcttagttaccatcaacttccacttgatttgaaacaatgctttgcgtattgtgcggtgttcccaaaggatgccaaaatggaaaaagaaaagctaatctctctctggatggcgcatggttttcttttatcaaaaggaaacatggagctagaggatgtgggtgatgaagtatggaaagaattatacttgaggtcttttttccaagagattgaagttaaagatggtaaaacttatttcaagatgcatgatctcatccatgatttggcaacatctctgttttcagcaaacacatcaagcagcaatatccgtgaaataaataaacacagttacacacatatgatgtccattggtttcgccgaagtggtgtttttttacactcttccccccttggaaaagtttatctcgttaagagtgcttaatctaggtgattcgacatttaataagttaccatcttccattggagatctagtacatttaagatacttgaacctgtatggcagtggcatgcgtagtcttccaaagcagttatgcaagcttcaaaatctgcaaactcttgatctacaatattgcaccaagctttgttgtttgccaaaagaaacaagtaaacttggtagtctccgaaatcttttacttgatggtagccagtcattgacttgtatgccaccaaggataggatcattgacatgccttaagactctaggtcaatttgttgttggaaggaagaaaggttatcaacttggtgaactaggaaacctaaatctctatggctcaattaaaatctcgcatcttgagagagtgaagaatgataaggacgcaaaagaagccaatttatctgcaaaagggaatctgcattctttaagcatgagttggaataactttggaccacatatatatgaatcagaagaagttaaagtgcttgaagccctcaaaccacactccaatctgacttctttaaaaatctatggcttcagaggaatccatctcccagagtggatgaatcactcagtattgaaaaatattgtctctattctaattagcaacttcagaaactgctcatgcttaccaccctttggtgatctgccttgtctagaaagtctagagttacactgggggtctgcggatgtggagtatgttgaagaagtggatattgatgttcattctggattccccacaagaataaggtttccatccttgaggaaacttgatatatgggactttggtagtctgaaaggattgctgaaaaaggaaggagaagagcaattccctgtgcttgaagagatgataattcacgagtgcccttttctgaccctttcttctaatcttagggctcttacttccctcagaatttgctataataaagtagctacttcattcccagaagagatgttcaaaaaccttgcaaatctcaaatacttgacaatctctcggtgcaataatctcaaagagctgcctaccagcttggctagtctgaatgctttgaaaagtctaaaaattcaattgtgttgcgcactagagagtctccctgaggaagggctggaaggtttatcttcactcacagagttatttgttgaacactgtaacatgctaaaatgtttaccagagggattgcagcacctaacaaccctcacaagtttaaaaattcggggatgtccacaactgatcaagcggtgtgagaagggaataggagaagactggcacaaaatttctcacattcctaatgtgaatatatataattaa

SEQ ID NO: 73 - protein, 970 aa, Solanum stoloniferum
MAEAFIQVLLDNLTSFLKGELTLLFGFQDEFQRLSSMFSTIQAVLEDAQEKQLNNKPLENWLQKLNAATYEVDDILDEYKTKATRFSQSEYGRYHPKVIPFRHKVGKRMDQVMKKLKAIAEERKNFHLHEKIVERQAVRRETGSVLTEPQVYGRDKEKDEIVKILINNVSDAQHLSVLPILGMGGLGKTTLAQMVFNDQRVTEHFHSKIWICVSEDFDEKRLIKAIVESIEGRPLLGEMDLAPLQKKLQELLNGKRYLLVLDDVWNEDQQKWANLRAVLKVGASGASVLTTTRLEKVGSIMGTLQPYELSNLSQEDCWLLFMQRAFGHQEEINPNLVAIGKEIVKKSGGVPLAAKTLGGILCFKREERAWEHVRDSPIWNLPQDESSILPALRLSYHQLPLDLKQCFAYCAVFPKDAKMEKEKLISLWMAHGFLLSKGNMELEDVGDEVWKELYLRSFFQEIEVKDGKTYFKMHDLIHDLATSLFSANTSSSNIREINKHSYTHMMSIGFAEVVFFYTLPPLEKFISLRVLNLGDSTFNKLPSSIGDLVHLRYLNLYGSGMRSLPKQLCKLQNLQTLDLQYCTKLCCLPKETSKLGSLRNLLLDGSQSLTCMPPRIGSLTCLKTLGQFVVGRKKGYQLGELGNLNLYGSIKISHLERVKNDKDAKEANLSAKGNLHSLSMSWNNFGPHIYESEEVKVLEALKPHSNLTSLKIYGFRGIHLPEWMNHSVLKNIVSILISNFRNCSCLPPFGDLPCLESLELHWGSADVEYVEEVDIDVHSGFPTRIRFPSLRKLDIWDFGSLKGLLKKEGEEQFPVLEEMIIHECPFLTLSSNLRALTSLRICYNKVATSFPEEMFKNLANLKYLTISRCNNLKELPTSLASLNALKSLKIQLCCALESLPEEGLEGLSSLTELFVEHCNMLKCLPEGLQHLTTLTSLKIRGCPQLIKRCEKGIGEDWHKISHIPNVNIYN

SEQ ID NO: 74 - DNA, 3592 bp, Solanum stoloniferum
atggctgaagctttcattcaagttctgttagacaatctcacttctttcctcaaaggggaacttacattgcttttcggttttcaagatgagttccaaaggctttcaagcatgttttctacaatccaagccgtccttgaagatgctcaggagaagcaactcaacaacaagcctctagaaaattggttgcaaaaactcaatgctgctacatacgaagtcgatgacatcttggatgaatataaaaccaaggccacaagattctcccagtctgaatatggccgttatcatccaaaggttatccctttccgtcacaaggtcgggaaaaggatggaccaagtgatgaaaaaactaaaggcaattgctgaggaaagaaagaattttcatttgcacgaaaaaattgtagagagacaagctgttagacgggaaacaggtactcatcttaaattagtattacaacaactaagtttatattcatttttttggcaattatcaaattcagaaaagggttaaatatactcatgtcctatcgtaaatagtgtaaatatacctctcgttgtactttcgatctgaatatacttgtcaaatctggcaagctcagaatcaaattatccaccccaacttttaaatactcgacatctttagaaatccacctgtctaactcatccactacccattccctttgctttgaattcttttctttacctataaacttggaacactcgatccgttttgcttttcttaacaaagcagctcagagaaaagaggttttcttctattctgtttctctgtgtgctgcacttgggtccttaatcccattaaaaacagggcatgttaatcccaacgacggtagcctttcctgacagctgactgtaaattttgtctaacaaagaaaaaaaaagattagacatgtttttccttgtcattgattaggctggatttctttcagagtggaacataggggatatattggaccaaaaatagaatgggtatatatttaaagtatttctgatagaacaggagtatattgtgcgaaaatatcctctattttctgttgtctcctaatgagtttgaatgtaataatattctcatgtggacattgcttgcaccaggttctgtattaaccgaaccgcaggtttatggaagagacaaagagaaagatgagatagtgaaaatcctaataaacaatgttagtgatgcccaacacctttcagtcctcccaatacttggtatggggggattaggaaaaacgactcttgcccaaatggtcttcaatgaccagagagttactgagcatttccattccaaaatatggatttgtgtctcggaagattttgatgagaagaggttaataaaggcaattgtagaatctattgaaggaaggccactacttggtgagatggacttggctccacttcaaaagaagcttcaggagttgctgaatggaaaaagatacttgcttgtcttagatgatgtttggaatgaagatcaacagaagtgggcaaatttaagagcagtcttgaaggttggagcaagtggtgcttctgttctaaccactactcgtcttgaaaaggttggatcaattatgggaacattgcaaccatatgaactgtcaaatctgtctcaagaagattgttggttgttgttcatgcaacgtgcatttggacaccaagaagaaataaatccaaaccttgtggcaatcggaaaggagattgtgaaaaaaagtggtggtgtgcctctagcagccaaaactcttggaggtattttgtgcttcaagagagaagaaagagcatgggaacatgtgagagacagtccgatttggaatttgcctcaagatgaaagttctattctgcctgccctgaggcttagttaccatcaacttccacttgatttgaaacaatgctttgcgtattgtgcggtgttcccaaaggatgccaaaatggaaaaagaaaagctaatctctctctggatggcgcatggttttcttttatcaaaaggaaacatggagctagaggatgtgggtgatgaagtatggaaagaattatacttgaggtcttttttccaagagattgaagttaaagatggtaaaacttatttcaagatgcatgatctcatccatgatttggcaacatctctgttttcagcaaacacatcaagcagcaatatccgtgaaataaataaacacagttacacacatatgatgtccattggtttcgccgaagtggtgtttttttacactcttccccccttggaaaagtttatctcgttaagagtgcttaatctaggtgattcgacatttaataagttaccatcttccattggagatctagtacatttaagatacttgaacctgtatggcagtggcatgcgtagtcttccaaagcagttatgcaagcttcaaaatctgcaaactcttgatctacaatattgcaccaagctttgttgtttgccaaaagaaacaagtaaacttggtagtctccgaaatcttttacttgatggtagccagtcattgacttgtatgccaccaaggataggatcattgacatgccttaagactctaggtcaatttgttgttggaaggaagaaaggttatcaacttggtgaactaggaaacctaaatctctatggctcaattaaaatctcgcatcttgagagagtgaagaatgataaggacgcaaaagaagccaatttatctgcaaaagggaatctgcattctttaagcatgagttggaataactttggaccacatatatatgaatcagaagaagttaaagtgcttgaagccctcaaaccacactccaatctgacttctttaaaaatctatggcttcagaggaatccatctcccagagtggatgaatcactcagtattgaaaaatattgtctctattctaattagcaacttcagaaactgctcatgcttaccaccctttggtgatctgccttgtctagaaagtctagagttacactgggggtctgcggatgtggagtatgttgaagaagtggatattgatgttcattctggattccccacaagaataaggtttccatccttgaggaaacttgatatatgggactttggtagtctgaaaggattgctgaaaaaggaaggagaagagcaattccctgtgcttgaagagatgataattcacgagtgcccttttctgaccctttcttctaatcttagggctcttacttccctcagaatttgctataataaagtagctacttcattcccagaagagatgttcaaaaaccttgcaaatctcaaatacttgacaatctctcggtgcaataatctcaaagagctgcctaccagcttggctagtctgaatgctttgaaaagtctaaaaattcaattgtgttgcgcactagagagtctccctgaggaagggctggaaggtttatcttcactcacagagttatttgttgaacactgtaacatgctaaaatgtttaccagagggattgcagcacctaacaaccctcacaagtttaaaaattcggggatgtccacaactgatcaagcggtgtgagaagggaataggagaagactggcacaaaatttctcacattcctaatgtgaatatatataattaa

SEQ ID NO: 75 - DNA, 2676 bp, Artificial Sequence
  cDNA
atgaattattgtgtttacaagacttgggccgttgactcttactttcccttcctcatcctcacatttagaaaaaagaaatttaacgaaaaattaaaggagatggctgaaattcttctcacagcagtcatcaataaatcaatagaaatagctggaaatgtactctttcaagaaggtacgcgtttatattggttgaaagaggacatcgattggctccagagagaaatgagacacattcgatcatatgtagacaatgcaaaggcaaaggaagttggaggcgattcaagggtgaaaaacttattaaaagatattcaacaactggcaggtgatgtggaggatctattagatgagtttcttccaaaaattcaacaatccaataagttcatttgttgccttaagacggtttcttttgccgatgagtttgctatggagattgagaagataaaaagaagagttgctgatattgaccgtgtaaggacaacttacagcatcacagatacaagtaacaataatgatgattgcattccattggaccggagaagattgttccttcatgctgatgaaacagaggtcatcggtctggaagatgacttcaatacactacaagccaaattacttgatcatgatttgccttatggagttgtttcaatagttggcatgcccggtttgggaaaaacaactcttgccaagaaactttataggcatgtctgtcatcaatttgagtgttcgggactggtctatgtttcacaacagccaagggcgggagaaatcttacatgacatagccaaacaagttggactgacggaagaggaaaggaaagaaaacttggagaacaacctacgatcactcttgaaaataaaaaggtatgttattctcttagatgacatttgggatgttgaaatttgggatgatctaaaacttgtccttcctgaatgtgattcaaaaattggcagtaggataattataacctctcgaaatagtaatgtaggcagatacataggaggggatttctcaatccacgtgttgcaacccctagattcagagaaaagctttgaactctttaccaagaaaatctttaattttgttaatgataattgggccaatgcttcaccagacttggtaaatattggtagatgtatagttgagagatgtggaggtataccgctagcaattgtggtgactgcaggcatgttaagggcaagaggaagaacagaacatgcatggaacagagtacttgagagtatggctcataaaattcaagatggatgtggtaaggtattggctctgagttacaatgatttgcccattgcattaaggccatgtttcttgtactttggtctttaccccgaggaccatgaaattcgtgcttttgatttgacaaatatgtggattgctgagaagctgatagttgtaaatactggcaatgggcgagaggctgaaagtttggcggatgatgtcctaaatgatttggtttcaagaaacttgattcaagttgccaaaaggacatatgatggaagaatttcaagttgtcgcatacatgacttgttacatagtttgtgtgtggacttggctaaggaaagtaacttctttcacacggagcacaatgcatttggtgatcctagcaatgttgctagggtgcgaaggattacattctactctgatgataatgccatgaatgagttcttccatttaaatcctaagcctatgaagcttcgttcacttttctgtttcacaaaagaccgttgcatattttctcaaatggctcatcttaacttcaaattattgcaagtgttggttgtagtcatgtctcaaaagggttatcagcatgttactttccccaaaaaaattgggaacatgagttgcctacgttatgtgcgattggagggggcaattagagtaaaattgccaaatagtattgtcaagctcaaatgtctagagaccctggatatatttcatagctctagtaaacttccttttggtgtttgggagtctaaaatattgagacatctttgttacacagaagaatgttactgtgtctcttttgcaagtccattttgccgaatcatgcctcctaataatctacaaactttgatgtgggtggatgataaattttgtgaaccaagattgttgcaccgattgataaatttaagaacattgtgtataatggatgtatccggttctaccattaagatattatcagcattgagccctgtgcctagagcgttggaggttctgaagctcagatttttcaagaacacgagtgagcaaataaacttgtcgtcccatccaaatattgtcgagttgggtttggttggtttctcagcaatgctcttgaacattgaagcattccctccaaatcttgtcaagcttaatcttgtcggcttgatggtagacggtcatctattggcagtgcttaagaaattgcccaaattaaggatacttatattgctttggtgcagacatgatgcagaaaaaatggatctctctggtgatagctttccgcaacttgaagttttgtatattgaggatgcacaagggttgtctgaagtaacgtgcatggatgatatgagtatgcctaaattgaaaaagctatttcttgtacaaggcccaaacatttccccaattagtctcagggtctcggaacggcttgcaaagttgagaatatcacaggtactataa

SEQ ID NO: 76 - protein, 891 aa, Solanum venturii
MNYCVYKTWAVDSYFPFLILTFRKKKFNEKLKEMAEILLTAVINKSIEIAGNVLFQEGTRLYWLKEDIDWLQREMRHIRSYVDNAKAKEVGGDSRVKNLLKDIQQLAGDVEDLLDEFLPKIQQSNKFICCLKTVSFADEFAMEIEKIKRRVADIDRVRTTYSITDTSNNNDDCIPLDRRRLFLHADETEVIGLEDDFNTLQAKLLDHDLPYGVVSIVGMPGLGKTTLAKKLYRHVCHQFECSGLVYVSQQPRAGEILHDIAKQVGLTEEERKENLENNLRSLLKIKRYVILLDDIWDVEIWDDLKLVLPECDSKIGSRIIITSRNSNVGRYIGGDFSIHVLQPLDSEKSFELFTKKIFNFVNDNWANASPDLVNIGRCIVERCGGIPLAIVVTAGMLRARGRTEHAWNRVLESMAHKIQDGCGKVLALSYNDLPIALRPCFLYFGLYPEDHEIRAFDLTNMWIAEKLIVVNTGNGREAESLADDVLNDLVSRNLIQVAKRTYDGRISSCRIHDLLHSLCVDLAKESNFFHTEHNAFGDPSNVARVRRITFYSDDNAMNEFFHLNPKPMKLRSLFCFTKDRCIFSQMAHLNFKLLQVLVVVMSQKGYQHVTFPKKIGNMSCLRYVRLEGAIRVKLPNSIVKLKCLETLDIFHSSSKLPFGVWESKILRHLCYTEECYCVSFASPFCRIMPPNNLQTLMWVDDKFCEPRLLHRLINLRTLCIMDVSGSTIKILSALSPVPRALEVLKLRFFKNTSEQINLSSHPNIVELGLVGFSAMLLNIEAFPPNLVKLNLVGLMVDGHLLAVLKKLPKLRILILLWCRHDAEKMDLSGDSFPQLEVLYIEDAQGLSEVTCMDDMSMPKLKKLFLVQGPNISPISLRVSERLAKLRISQVL

SEQ ID NO: 77 - DNA, 462 bp, Artificial Sequence
  cDNA
atgcgagtgtacgccgccttcgtcgtggcgctggtctcccttctagctaccaacagtgctgttctagcagtaacgaccccgaccaagttagcgaagttgacggctcctgaattcacagacaacgagaatcgtcagcgtcgcttgctaagaaaacaagaaggtgccgagctgggtgacgaagaacgaacgagcacccaaaaccttgggaactctttgatgagggtgttctcgaaagaggccacaaggaaatactatttggatttgttcaagcgagccgactttacagcgaatctcccaaaacttgcgaaaaaaggtgggcctgacaggctgaacgatgccttaaaaaaactacgaaaggctggcatctctgaggagaagtttgcggagctcaaaggtgcggcggcgaagtacgcagatgactggtatagaatatatggcaagcttgatcctattagagcttga

SEQ ID NO: 78 - protein, 153 aa, Phytophthora infestans
MRVYAAFVVALVSLLATNSAVLAVTTPTKLAKLTAPEFTDNENRQRRLLRKQEGAELGDEERTSTQNLGNSLMRVFSKEATRKYYLDLFKRADFTANLPKLAKKGGPDRLNDALKKLRKAGISEEKFAELKGAAAKYADDWYRIYGKLDPIRA

SEQ ID NO: 79 - DNA, 2592 bp, Artificial Sequence
  cDNA
atggctgaaattcttcttacagcagtcatcaataaatctgtagaaatagctgcaaatgtactctttcaacaagggagccgcttgaattttttgaaagaggacatcgattggctccagagagtactgagacacattcgatcatatgtagacgatgcaaaggccaaggaagttggaggcgattcaagggtcaaaaacttattaaaagatattcaagaattggcaggtgatgtggaggatctcttagatgagtttcttccaaaaatccaacaatccagtaagttcaaaggcgcaatttgttgccttaagacggtttcttttgccgatgagtttgctgtggagattgagaagataagaagaagggttgctgacattgatagtttaaggacaactttcaacatcacagatacaagtaacaacaataatgattgcattccaatggaacagagaagaaaattccttcatgctgatgaaacagaggtcatcggtttggatgatgacttcaacaagctccaagacaaattgcttgttcaagatttgtgtaatggagttgtttcaatagttggcatgcctggtctaggaaaaacaactcttgccaagaaactttataggcatgtccgtcatcaatttgagtgttctgcactggtctacgtttcacaacagccaagagcaggagaaatcttacttgacatagccaagcaagttggactgacggacgagggaaggaaagaacacttggaggacaatctaagatcacttttggaaacaaaaaggtatgttattctcttagatgacatttgggatactaaaatctgggatgctctgaaccgtgtccttcgtcctgaatgtgattcaaaaattggcagtaggataattatcacttctcgatatcatcatgtaggcagatacataggagaggatttctcgctccacgagttgcaacccttagattcagagaaaagttttgaactctttaccaagaaaatctttatttttgataataataataattgggctaatgcttcacctgtcttggtagatattggtaaaagtatagttcggagatgtggaggtattccattagccattgtggtgacggcaggcatgttaagggcaagagaaagaacggaacatgcatggaatagagtgcttgagcgtataggtcataatattcaggatggatgtgctaaggcattggctctgagttacaatgatttgcccattgcattaaggccatgtttcttgtactttggtctttaccccgaggaccatgaaattcgtgcttttgatttgacaaatatgtggattgctgagaagctgatagttgtaaatagtggcaataggcgagaggctgaaagtttggcggatgatgtcctaaatgatttggtttcaagaaacttgattcaagttgccaagaggacatatgatggaggaatttcaagttgtcgcatacatgacttgttacatagtttgtgtgttgacttggctaaggaaagcaacttctttcacaccgagcacaatgcatttggtgatcccggcaatgtttctaggctgcgaaggattacattctactctgataataatgccatgaatgagttcttccgttcaaatcctaagcttgagaagcttcgtgcacttttctgtttcacaaaaggagactcttgcatattttctcatttggctcatcatgacttcaaattattacaagtgttggttgtagtccagcctcgaaaaaattatgatttcagcattagccaaatcaaaattgggaacatgagttgcttacgctatctgcgattcgagggggatatttatggggaactgccaaattgtatggtgaagctcaaacacttagagaccctagatattagtaaaagcttcattattaaacttcctactggtgtttggaagactacacaattgagacatcttcgttctaatggttataatctagcaccttacagttacttttgtataagcccattttttccaaacgtgcctcctaataatgtacaaactttgatgtggatggatggtgaattttttgaaccgagatggttgcaccgatttatcaatttaagaaaactgggtttacaggaagtatccgattctaccattaagaaattatcaacattgagccctgtgccaacgacactggaggttctaaagctcagctcatttttcagtgaattgagagagcaaataaacttgtcgtcgtatccaaatattgttaagttgcatttgaacggaagaattcccttgaacgtctctgaatcattccctccaaatcttgtcaagcttactctttgcaacttgatggtagacggtcatgtagtggcagtgcttaagaaattacccaaattaaagatacttacattgcataggtgcagacatgatgcagaaaaaatggatctctctggtgatggtgatagctttccgcaacttgaagttttgcatattaaagatccagtctgcttgtctgaagtaacgtgcacggatgatgtcggtatgcctaaattgaaaaagttattacttatagaaagaactgattccaacgttaggctctcggaaagacttgcaaaactgagagtatga

SEQ ID NO: 80 - protein, 863 aa, solanum edinense
MAEILLTAVINKSVEIAANVLFQQGSRLNFLKEDIDWLQRVLRHIRSYVDDAKAKEVGGDSRVKNLLKDIQELAGDVEDLLDEFLPKIQQSSKFKGAICCLKTVSFADEFAVEIEKIRRRVADIDSLRTTFNITDTSNNNNDCIPMEQRRKFLHADETEVIGLDDDFNKLQDKLLVQDLCNGVVSIVGMPGLGKTTLAKKLYRHVRHQFECSALVYVSQQPRAGEILLDIAKQVGLTDEGRKEHLEDNLRSLLETKRYVILLDDIWDTKIWDALNRVLRPECDSKIGSRIIITSRYHHVGRYIGEDFSLHELQPLDSEKSFELFTKKIFIFDNNNNWANASPVLVDIGKSIVRRCGGIPLAIVVTAGMLRARERTEHAWNRVLERIGHNIQDGCAKALALSYNDLPIALRPCFLYFGLYPEDHEIRAFDLTNMWIAEKLIVVNSGNRREAESLADDVLNDLVSRNLIQVAKRTYDGGISSCRIHDLLHSLCVDLAKESNFFHTEHNAFGDPGNVSRLRRITFYSDNNAMNEFFRSNPKLEKLRALFCFTKGDSCIFSHLAHHDFKLLQVLVVVQPRKNYDFSISQIKIGNMSCLRYLRFEGDIYGELPNCMVKLKHLETLDISKSFIIKLPTGVWKTTQLRHLRSNGYNLAPYSYFCISPFFPNVPPNNVQTLMWMDGEFFEPRWLHRFINLRKLGLQEVSDSTIKKLSTLSPVPTTLEVLKLSSFFSELREQINLSSYPNIVKLHLNGRIPLNVSESFPPNLVKLTLCNLMVDGHVVAVLKKLPKLKILTLHRCRHDAEKMDLSGDGDSFPQLEVLHIKDPVCLSEVTCTDDVGMPKLKKLLLIERTDSNVRLSERLAKLRV

SEQ ID NO: 81 - DNA, 279 bp, Artificial Sequence; identical to SEQ ID NO: 62
  cDNA

SEQ ID NO: 82 - protein, 92 aa, Phytophthora infestans; identical to SEQ ID NO: 63

SEQ ID NO: 83-84 - skipped (2 entries)

SEQ ID NO: 85 - DNA, 3738 bp, Artificial Sequence
  cDNA
atgaatgaaaatgaaattgaggaaatgttagatcacctaagaaggatcaaaattgaaggtaacctggatttcttcaagattcgtcgtattggggatcttgatattgtgctaagagtttttagaacctttataaagtatcatgttcttttacctgattgttttgtcaaactcacaatgaatgccgaatggactgtggaaatgcttcaccgggtatttgatgggatatcagatgaatgtaaaactaaccttaatttggaaaggctagaatcacatttgttggaattctttgaaggtaactccagtttaagttacaattatgagttgaatgattttgatctgtcgaaatatatggattgtctggaaaaaattctaaatgatgtactaatgatgttcctggaaaagggtaggtcctgttatcccatagaaaaacttgcaatacagctatctataaagaaactgaaaattgttcaaaagaaaatgatatttttgagatacatatataccacagagataaatggtaacgtcaactatgagaagctggaatgtttggagactcgaattcagttcattgctaacactgtgggacaattttgtttggccgtattagattatgttgctgatattgaatttagtgataataatgatatctttaatatacctccgtatctattatcattgattgtgtttgtggagctggaaatgaagaagatttttcatggtgaactaaaggtgtcaaagtttactcaatcaaaaactttcaaggacaagaaattaccaaaagaattttcagatcttctccaatatctgttgatgtatctcagaaacgaaaaactcgagaactttcctaataatatctctgctcaaaatattgatgtggcaatagaattcttgttggttttccttgatgctgatgtgtcaaatcacgttattaatggtaactggttgaatgaggtcttgttaaaggttggagctatagcgggtgatattctatatgtaattcaaaagcttcttcctagatctataaacaaagatgacactagcaaaataagtttttgctcgatacagatattggagaagactaaagatctgaaggcacaagttgagacgtactacaaatccttaaaatttactccatctcagttccccacctttggtggattgagctttctggattctcttttaaggaaactgaatgagatgtcgaaatctaagtctggtttagatttcctgatgaaacctcttttagggaatttggagaaagagttatcatctcttacatccattttagagaaggagctatcatccattttcagagatgtcgtgcaccacgaacataaaattcctaaagatcttcagagacgtaccatcaatttggcatatgaggctgaggttgccattgactctattcttgctcagtataatgcttttttgcatattttttgctcacttcctacaattttaaaagagatcaagcaaattaatgcagaggtgactgagatgtggtcagcaaacattcctcttaatcctcgctacgtggctgctccatttaaacatctgccagctcgacatagcaatcttgtgactgatgaggaggtagtgggttttgagaataaagcagaaaaactaattggttatctgattagaggtacaaatgagctagacgtcatcccaattgtaggcatggggggacaagggaaaacgacaattgctagaaagttgtacaataatgacatcattgtttctcgctttaatgttcgagcatggtgcatcatttctcaaacatatagccgaagagagctattacaagagattttcagtcaagttacgggctccaaggacaaggaagatgaggtaggcaaacttgctgacaggttgaggaaaagcctaatgggaaagagatatctcattgtattggatgatatgtgggattgtatggtatgggatgacttaaggctttcttttccagatgatggaatcagaagtagaatagtcgtaacaactcgacttgaagaagtgggtaagcaagtcaagaaccatactgatccttattctcttccattcctcacaacaaaagagagttgccaattgctgcagaaaaaagtgtttcaaaaggaagattgcccgcctgaactacaatatgtgagtcaagcagttgcagaaaaatgcaaaggactgcccctagtggttgtcttggtagctggaataatcaaaaaaaggaaaatggaagaatcttggtggaatgaggtgaaagatgctttatttgactatcttgacagtgagttcgaagaatacagtctagcgactatgcagttgagttttgataacctagctgattgtttaaagccttgtcttctttatatggggatgtttctggaggacgcaagaattccagtgtctaaattgataagcttatggattgctgaaggattcgtggagaacactgaatctgggagattaatggaagaggaagctgaaggttacttgatggatctcattagcagtaacgtggtaattgtttcaaagaaaggttataatggtaaagtcaaatgctgccaggttcatgatgttgtgcatcacttttgcttgaagaagagtagagaagaaaagtttatgcttgcagtgaagggtcaatatatccagtttcaaccgttggattggaagggaagtcgagtgagcttcagtttcagtgaagagctttccaagtttgcatctctggtttccaaaacacagaagcctttccaccaacacttgaggtctctgataacggctaatggtggagaatctattgatgtgattcccgtctgtcagattaatgaattgcgacttcttaaggtcttggatttgagttcttattatgtggagtctttgtggttagctagattaaacccacttaatcagctgaagtacctcgcagtttgggcaggtactttctattttgatccacaatcacatctgccccatatagaaactttaattgtgacgagttgtttttatggtgtacggttaccagtgtctttttgggaaatggaaaaattaaggcatgttcattttgctggcgctggttttgctatgcagggactctttgaaggatcctctaaattggaaaatttgaggatattaaagaaaattgaggaatttccaattgataggctggatgtgttatcaaggaggtgtcctaatcttcaacaacttcaaatcacatttgaggatgatgtagagcctttttgtcccaaattggagagtcttacccagcttcaagaacttcaactttcctttgtgcatccccgcattctatccgggttacagttgccttcaaatttaaacaaattggtacttaaaggaattcatatggaaagtgctatttccttcattgcggaactaccaagcctggagtatctccaattactagatgtgtgttttcctcaatcagaagagtggtgccttggagatatcacgttccataaacttaagttgttgaaactggtgcagttaaatatctcaaagtgggatgcctcggaggaatcatttcccttgcttgaaacacttgttataaaaaagtgtgatgaccttgaggagatcccacttagctttgctgatattccatcattgaaacagattaagttgattgggtcttggaaagtatctatggaggcttcagctgtgagaattaaggaagaagtcgaagagattgaaggatgtgaccgtatagacctcgtaagaagaagtcgaagagattga

SEQ ID NO: 86 - protein, 1245 aa, Solanum demissum
MNENEIEEMLDHLRRIKIEGNLDFFKIRRIGDLDIVLRVFRTFIKYHVLLPDCFVKLTMNAEWTVEMLHRVFDGISDECKTNLNLERLESHLLEFFEGNSSLSYNYELNDFDLSKYMDCLEKILNDVLMMFLEKGRSCYPIEKLAIQLSIKKLKIVQKKMIFLRYIYTTEINGNVNYEKLECLETRIQFIANTVGQFCLAVLDYVADIEFSDNNDIFNIPPYLLSLIVFVELEMKKIFHGELKVSKFTQSKTFKDKKLPKEFSDLLQYLLMYLRNEKLENFPNNISAQNIDVAIEFLLVFLDADVSNHVINGNWLNEVLLKVGAIAGDILYVIQKLLPRSINKDDTSKISFCSIQILEKTKDLKAQVETYYKSLKFTPSQFPTFGGLSFLDSLLRKLNEMSKSKSGLDFLMKPLLGNLEKELSSLTSILEKELSSIFRDVVHHEHKIPKDLQRRTINLAYEAEVAIDSILAQYNAFLHIFCSLPTILKEIKQINAEVTEMWSANIPLNPRYVAAPFKHLPARHSNLVTDEEVVGFENKAEKLIGYLIRGTNELDVIPIVGMGGQGKTTIARKLYNNDIIVSRFNVRAWCIISQTYSRRELLQEIFSQVTGSKDKEDEVGKLADRLRKSLMGKRYLIVLDDMWDCMVWDDLRLSFPDDGIRSRIVVTTRLEEVGKQVKNHTDPYSLPFLTTKESCQLLQKKVFQKEDCPPELQYVSQAVAEKCKGLPLVVVLVAGIIKKRKMEESWWNEVKDALFDYLDSEFEEYSLATMQLSFDNLADCLKPCLLYMGMFLEDARIPVSKLISLWIAEGFVENTESGRLMEEEAEGYLMDLISSNVVIVSKKGYNGKVKCCQVHDVVHHFCLKKSREEKFMLAVKGQYIQFQPLDWKGSRVSFSFSEELSKFASLVSKTQKPFHQHLRSLITANGGESIDVIPVCQINELRLLKVLDLSSYYVESLWLARLNPLNQLKYLAVWAGTFYFDPQSHLPHIETLIVTSCFYGVRLPVSFWEMEKLRHVHFAGAGFAMQGLFEGSSKLENLRILKKIEEFPIDRLDVLSRRCPNLQQLQITFEDDVEPFCPKLESLTQLQELQLSFVHPRILSGLQLPSNLNKLVLKGIHMESAISFIAELPSLEYLQLLDVCFPQSEEWCLGDITFHKLKLLKLVQLNISKWDASEESFPLLETLVIKKCDDLEEIPLSFADIPSLKQIKLIGSWKVSMEASAVRIKEEVEEIEGCDRIDLVRRSRRD

SEQ ID NO: 87 - DNA, 735 bp, Artificial Sequence
  cDNA
atgcgctcaatccaacttctgatcatcgcgctggttgcgttcctcgcctgttgtagtgcaacaccagcaccgccacaagtatccctctcgttccttccagtccagagacggtcactgcgcactgacacaactcttgacagtgaagacaacaacgaagactcgggggagagaagcgtctggaaacatgtcaaagtgaggtggtggttagagaccgaaaagtctgacgactttgtccggaaggcgctcaaactaaacggacttgacgatacagctatgaaggcccacaagaactacaaatattatgcctattttgccaaaaaggctgaagactatcttttcaacaagtggctacggaatcatgtacccacatttgaagcctggaagagtctcaacctgggcaaaatcaccaaggctgaccagctgaaggagatagcaaacactaagaacttcattagctacagtcgcttcgtgaagcagtatgacgacaacgtagtttcgacgctgaacgccgggtataacccccctgttgtggcggttgctaggggtgcctcagaagctgagataacagcgcgaacgatgatcatggctagtgcacgtagggacgacgatgtcgccaaagtgttgttgggcttgactaaaccgggctatccgcggcgagtgctagacggcaatgcgctcacgcagcatgatgagtacaagtactatcagctttttaaagaagcgaaaacatcgtaa

SEQ ID NO: 88 - protein, 244 aa, Phytophthora infestans
MRSIQLLIIALVAFLACCSATPAPPQVSLSFLPVQRRSLRTDTTLDSEDNNEDSGERSVWKHVKVRWWLETEKSDDFVRKALKLNGLDDTAMKAHKNYKYYAYFAKKAEDYLFNKWLRNHVPTFEAWKSLNLGKITKADQLKEIANTKNFISYSRFVKQYDDNVVSTLNAGYNPPVVAVARGASEAEITARTMIMASARRDDDVAKVLLGLTKPGYPRRVLDGNALTQHDEYKYYQLFKEAKTS

SEQ ID NO: 89 - DNA, 3909 bp, Artificial Sequence
  cDNA
atgaattattgtcttccttcgagtactctacaaacaactaccaaacgaagacttactttgagaagactttgttgcaaacagctcaggaagaagactttggtgcagactgcagaggaagaggaagcaaacacaacaatggccgatcctgtaattggtgctactgttcaagttttgcttgaaaagttgatttctctcactatcgaggaagtcaacagctcaagggatttcaacaaagatctcgaaatgttgacacaaaatgtatctttaatccaagctttcattcatgatgttgaaacaccacaagagaaacaacagtctgtggaacaatggctcaacaggcttgagagagttgctgaagatgctcaaaatgtgtttgatcgattcatatatgaatctctcaaaacaaaagtggtgaggagcccattgaaaaaggtcagtggtttcttttctcatactgcttttaagagaaaaatgtctcaaaaaatcaacaacatcaataaagagttgacggctatcaataaggtagccaaagacctcggtctacaatcactcatggttccttctcggaaaatactaccaattcgagaaacagattcctttgtagttgcttctgatattgtcggtagagatttggatattgctgagataaaggagaagattttgaacatgagagaggaggatattgttctgtccaccattcccatagtaggtatgggaggtttagggaaaacaactgtggctaagaggatttacaatgatgaacacatgaagcaaatctttgaaaagagaatttggttgtgtctacctgaaatgtctgaaacgaagagctttcttgaacaaatcctcgaatcgttgatagagaggaaaattgaggttgaaaggagagatataatagtcaagaagctacaagatgaattgggaggaaaaaaatatttgctagtcctggatgatttgtggtgtgttgactctacatcgtggcatgagttcattgacaccttgagaggaataaatacatccagaggaaactgcattcttgtgactactcgtaggaagcaggtggcatccacagtagcaacagatcttcatatcttggggaagttaacagaagatcattgttggtctattttcaaacaaaaagcatttgttgatggcagggttccagaggaattagcgagcatgggcaacaagattgttaaaatgtgccaaggtctaccgttggctgcaagtgtgttgggagggctcttacacaacaaagaaaaacatgaatggcaagcaattcttgatggcaacctccttgttgcaggtgaagatgataatggagaaaatagcataaagaaaatcctaaaactcagctatgattatctaccatctccacatctgaaaaaatgctttgcttactttgcaatgtttccaaaagattatatgtttgaaaaggaccaactaatccaactctggatggcagaagggtttcttcgtccaagtcaagagatccctgtgatggaagacgttgggcacaggttttttcaaatcttgttgcagaattccttgctacaagatgttctgttagatgaacacaacaatataacacactgcaagatgcacgatcttgtgcatgatttggctggagatatcttaaaatctagactatttgatccgaagggcgacaatggagaaaaactttctcaagttcgatactttggatgtgagtcaccaacggatcaaatagataagatatatgagccagaacgtttgtgcacactgttttggagaagcaattatacatctaaagatatgctgttgaactttaagttcttgagagttttagatttgtccagttcaggaatcaaggagttgtcagccaaaatcgggaagctgatatacttgagatatcttgatctctcgaacactgagatcacagccttgcccaactccatttgcaagctctataatttgcaaacatttagagtcatcaactgcttttcactccaggaacttccatatgagatgagaaatatgataagtttgagacacatatattacacttctgttgacgaaacaagtgggcattggggaggatggtgtcttcacaatgaacattttcagattccacttaatatggggcaattgactagtcttcaaaccctcaagtttttcaaggtaggtttagagaaaggtcgtcaaatagaagaattaggtcatttgaaaaacctaagaggtgaattgacgatcaatggtctccaattggtctgtgataaagaagaggctcaaacagcatatttacacgataaaccaaacatctgcaagctggcatatttatggtcccatgatgaatcagaaggctgtgagatcaatgatgagcatgtgttggatggtcttcaaccgcatcctaacttgaaaaccttagcagtagtggactatttagggactaaatttccttcatggttcagtgaagagtcgctaccaaatttggtcaagttgaaattaagtggtagcaaaaggtgcaaagaaattccatcccttggccaactgaaattccttcggcatcttgagctgataggattccatgagttggaatgcattggacctgctttttatggtgttgagatgagaaatattggatcaaacagcattatccaagtgttcccgtcattgaaaaaactagtattgaaggatatgcgtagccttattgagtggaagggagatgaagttggagtaagaatgtctcccggtcttgagaagttgcggattacagactgtccattgttaaaaagtattccgaatcaatttgaaatcctccgtcaattaaaaattacaggagttgacagtgaaatgccattgttgaacttgtgcagcaacttgacatctctcgtaaagcttagagtctatgatatgaaagagctcacttgtcttccagatgagatgctacgtaacaacgtttctcttcaacagataataattttcaactgcggagagtttcgtgaattgccacaaagcttgtacaatctccattctcttaggagattagacatttacaactgcaccaatttcagttctcttcctgttcccaatggagacaactatttgacttccctcgaattcttttgcttacataattgtaatggattgatcagtataccaattggaatgctagatcaatgccggctagtgtttttgaatgtcagctgctgtaacaacttggtttcattccctgtacatgtgtgggaaatgccttcactttcatatttgcttatatcagaatgtcccaaattgattagtgtacccaaagtgggccttcaccatctcaccgggttagtgagattgggaattggtcctttctcagagatggtggattttgatgcattccaattgatttttaatggcattcagcagttgttgtcccttcgtgatctggaggtgtacggacgtgggcactgggattctctgccctatcagcttatgcaactctctgacctaagagagatcacaatagctgatttcggaattgaggctcttcctcctactcttgacaaccttacttctcttgaaagtttgacgctagtgaggtgcaaacagctacaacatctgaacttctcagatgccatgcccaaattacggctcctgtggatacgtgattgtccattgttagaagctctgtcggatgggctcggcaaccttgtttctttggaagaattatatttacatgactgcgaaaaactagagcatctaccgtcccgagatgccatgcgacgcctcactaaattatggaacatgagaattaaaggatgcccaaagttagaagaaagtttcaccaactactcccagtggtccaaaatttcccatatttcaaatattgaattaggtgggtggagaaggacagccataagtctcggtttctctttcactttctga

SEQ ID NO: 90 - protein, 1302 aa, Solanum chacoense
MNYCLPSSTLQTTTKRRLTLRRLCCKQLRKKTLVQTAEEEEANTTMADPVIGATVQVLLEKLISLTIEEVNSSRDFNKDLEMLTQNVSLIQAFIHDVETPQEKQQSVEQWLNRLERVAEDAQNVFDRFIYESLKTKVVRSPLKKVSGFFSHTAFKRKMSQKINNINKELTAINKVAKDLGLQSLMVPSRKILPIRETDSFVVASDIVGRDLDIAEIKEKILNMREEDIVLSTIPIVGMGGLGKTTVAKRIYNDEHMKQIFEKRIWLCLPEMSETKSFLEQILESLIERKIEVERRDIIVKKLQDELGGKKYLLVLDDLWCVDSTSWHEFIDTLRGINTSRGNCILVTTRRKQVASTVATDLHILGKLTEDHCWSIFKQKAFVDGRVPEELASMGNKIVKMCQGLPLAASVLGGLLHNKEKHEWQAILDGNLLVAGEDDNGENSIKKILKLSYDYLPSPHLKKCFAYFAMFPKDYMFEKDQLIQLWMAEGFLRPSQEIPVMEDVGHRFFQILLQNSLLQDVLLDEHNNITHCKMHDLVHDLAGDILKSRLFDPKGDNGEKLSQVRYFGCESPTDQIDKIYEPERLCTLFWRSNYTSKDMLLNFKFLRVLDLSSSGIKELSAKIGKLIYLRYLDLSNTEITALPNSICKLYNLQTFRVINCFSLQELPYEMRNMISLRHIYYTSVDETSGHWGGWCLHNEHFQIPLNMGQLTSLQTLKFFKVGLEKGRQIEELGHLKNLRGELTINGLQLVCDKEEAQTAYLHDKPNICKLAYLWSHDESEGCEINDEHVLDGLQPHPNLKTLAVVDYLGTKFPSWFSEESLPNLVKLKLSGSKRCKEIPSLGQLKFLRHLELIGFHELECIGPAFYGVEMRNIGSNSIIQVFPSLKKLVLKDMRSLIEWKGDEVGVRMSPGLEKLRITDCPLLKSIPNQFEILRQLKITGVDSEMPLLNLCSNLTSLVKLRVYDMKELTCLPDEMLRNNVSLQQIIIFNCGEFRELPQSLYNLHSLRRLDIYNCTNFSSLPVPNGDNYLTSLEFFCLHNCNGLISIPIGMLDQCRLVFLNVSCCNNLVSFPVHVWEMPSLSYLLISECPKLISVPKVGLHHLTGLVRLGIGPFSEMVDFDAFQLIFNGIQQLLSLRDLEVYGRGHWDSLPYQLMQLSDLREITIADFGIEALPPTLDNLTSLESLTLVRCKQLQHLNFSDAMPKLRLLWIRDCPLLEALSDGLGNLVSLEELYLHDCEKLEHLPSRDAMRRLTKLWNMRIKGCPKLEESFTNYSQWSKISHISNIELGGWRRTAISLGFSFTF

SEQ ID NO: 91 - DNA, 348 bp, Artificial Sequence
  cDNA
atggcgacggccactgttctagtacagagtcctgcgtccggtttgaccacgactgtggctgacacggcccagacggcaaccagcattctaactcctgttctagctggggagccgaacaaacacgttacaacgcgatctttgagaacgcatccgatagccgacagcgacgacggcgaagagcgactgcttaatggtatgacagattttgtcaagtaccacgctggaaagatgaatcccgagcagctttacaagtacttaaagttacaaggacgtggtcaagaagcctacaaacacaagaactacgctagttacattaagaagtcgaagaagtggtggaagaaccagtaa

SEQ ID NO: 92 - protein, 115 aa, Phytophthora infestans
MATATVLVQSPASGLTTTVADTAQTATSILTPVLAGEPNKHVTTRSLRTHPIADSDDGEERLLNGMTDFVKYHAGKMNPEQLYKYLKLQGRGQEAYKHKNYASYIKKSKKWWKNQ

SEQ ID NO: 93 - DNA, 3849 bp, Artificial Sequence
  cDNA
atggagattggcttagcagttggtggtgcatttctctcttcagctttgaatgttctctttgataggcttgctcctcacggtgatctgctcaacatgtttcagaagcataaggatcatgttaagctcttaaagaagctggaggacattttgctcggtcttcagattgtgctaagtgatgcagagaataaacaagcatcaaatcgacatgtgagccagtggttcaataagcttcagaatgctgtggacggtgctgagaacttgatagaacaagtcaattatgaagctttgaggcttaaggtggaaggccagcatcaaaatcttgcagaaacaagcaaccagcaagtaagtgaccttaacctgtgcttcagtgatgatttctttcttaacataaaggataagttggaagaaaccattgaaacattggaggtgttggaaaagcaaattggtcgccttggcttaaaggaacattttggttcgactaaacaagaaactagaacaccttcaacttctttagttgatgactctgatatctttggaaggcagaatgatatagaggatttgattgaccgtttattatctgaagatgcaagtggaaaaaagcggactgtagttcctattgttggaatgggtggtctgggtaagacaacacttgctaaagcggtttacaatgatgagagagtgcagatacattttggtttgaaagcttggttttgtgtttctgaggcatttgatgctttcagaataacaaaagggttacttcaagaaattggctcatttgacttgaaggctgatgacaatcttaatcagctacaagtcaaattgaaggaaagattaaagggaaagaagtttcttatagttttggatgatgtgtggaatgacaactacaacaagtgggatgaattgagaaatgtttttgtacaaggagatataggaagtaagatcattgtgacgacacgtaaagagagtgttgccttgatgatgggaaatgagcaaattagcatggacaatttgtctactgaatcctcttggtctttatttaaaacacatgcatttgaaaacatgggtcctatgggacatccggaacttgaagaggtcgggaaacaaattgcagctaagtgcaaaggactgcccttagctctgaagacgctcgctggcatgttacgctccaaatcagaggttgaagagtggaaacgtattttgagaagtgaaatatgggagctgccacacaatgacatattaccagcgttgatgttgagctacaatgatcttcccgcacatttaaagcgatgtttttccttttgtgcaatatttcctaaagattatccctttaggaaagaacaagttattcatctgtggattgccaatggtctcgtaccacaggaagatgtaataattgaagattcaggcaaccaatactttctcgagttgaggtcaagatcattattcgaaagggtcccaaatccttctcaagggaacacagagaatttattcttaatgcatgaccttgtcaatgatttagcgcaaattgcatcttcaaaactttgtatcaggttggaagagagccaaggatctcatatgttggaacaaagtcaacacttatcatattcaatgggatatggtggtgagtttgagaaattgacacccctctacaaattggagcagctgaggacattgcttccgacatgtattgatctccctgattgttgtcaccatctaagcaagagggtgctacataacatactgccaagactaacatccttaagggcattatcgttgtcatgctatgagattgttgagttgccaaatgacttgtttatcaaattaaagctcctcagatttttggatatttctcggacagagattaaaaggttgccagattccatttgtgcattgtataacttagagacacttctcctgtcatcttgttatgatcttgaggagctaccgctgcagatggagaagctgattaacttgcgtcatcttgacataagcaacactcgtctcttgaagatgccgctacatctgagcaagttgaaaagcctccaagtgttagtgggagccaaatttcttataggtggtttgagaatggaagatttgggtgaagtacataacttgtacggatctctatcagttgtagagttgcaaaatgtggttgatagaagggaagctgtgaaggcaaagatgagggagaagaatcacgtcgacaggttatatttggagtggagtggaagtagtagtgccgacaattcacaaacagaaagagacatacttgatgagctacgcccccataaaaacataaaagtagtcaaaatcactggatatagagggacaaactttcccaattggctagctgatcctttgtttcttaagctggtaaaattgtctcttagaaactgcaagaactgttattcattgccagcactaggacaactcccttttctgaaattcctttcgattagagagatgcatggaataacagaggtgacggaagaattctatggcagttggtcctccaaaaagccttttaactgtcttgagaagcttgaatttaaagatatgccggagtggaagcaatgggacctactaggaagtggagagttccctatacttgagaagcttttgattgaaaattgccctgaactcagtttggagacggtacccatccaactttcaagtttaaaaagttttgacgtaattggttctcccttggttataaactttcctttaagcatactgcccactaccttgaagagaataaagatatctgattgccagaaattgaaattggaacagccaactggtgagattagtatgtttctggaggaattgacactgattaaatgtgattgtatagatgatatatcacctgagttactcccaagagcacgcaaattgtgggtacaggattggcacaaccttactaggtttttgattcctactgccactgaaactctcgatatttggaattgtgagaatgttgaaatactttcggtggcatgtggggggacccagatgacgtcactgactattgcctactgtaagaagctgaagtggctgccagaacgtatgcaggaactccttccatctcttaaggaactgcatctgtctaattgtccagaaatagagtcctttcctgaaggtggattgcccttcaatttacaacaacttgcgatcagatattgcaagaaactggtgaacggccgaaaggagtggcatttacagagacgactctgtctcacagcgttaatcatctaccatgatggcagtgacgaagagattgttggtggtgagaattgggagttgccttcctctattcaaaggcttaccatagtgaatctgaaaacattaagcagccaacatctcaaaaacctcacctctcttcaatatctatttattaggggtaatttacctcagattcagccaatgctggaacaaggccagtgttcgcacctcacttcgcttcaaagtctacaaatctcctccctccaatcacttcctgaatcggcactgccctcctccctctctcacctggagatctcccattgccctaatctccaatcacttcctgaatcggcactgccctcctccctctctcagctgaccatcaataattgccctaatctccaatcactttccgaatcaacactgccctcctccctctctcagctggagatctccttttgccctaatctccaatatcttccactaaaagggatgccctcttccctctctgaactatctatttacaaatgcccattgctcaaaccacaactagaatttgacaagggggaatactggccaaatattgctcaatttcccaccataaagatcgatagggaatgcatgtga

SEQ ID NO: 94 - protein, 1282 aa, Solanum tuberosum
MEIGLAVGGAFLSSALNVLFDRLAPHGDLLNMFQKHKDHVKLLKKLEDILLGLQIVLSDAENKQASNRHVSQWFNKLQNAVDGAENLIEQVNYEALRLKVEGQHQNLAETSNQQVSDLNLCFSDDFFLNIKDKLEETIETLEVLEKQIGRLGLKEHFGSTKQETRTPSTSLVDDSDIFGRQNDIEDLIDRLLSEDASGKKRTVVPIVGMGGLGKTTLAKAVYNDERVQIHFGLKAWFCVSEAFDAFRITKGLLQEIGSFDLKADDNLNQLQVKLKERLKGKKFLIVLDDVWNDNYNKWDELRNVFVQGDIGSKIIVTTRKESVALMMGNEQISMDNLSTESSWSLFKTHAFENMGPMGHPELEEVGKQIAAKCKGLPLALKTLAGMLRSKSEVEEWKRILRSEIWELPHNDILPALMLSYNDLPAHLKRCFSFCAIFPKDYPFRKEQVIHLWIANGLVPQEDVIIEDSGNQYFLELRSRSLFERVPNPSQGNTENLFLMHDLVNDLAQIASSKLCIRLEESQGSHMLEQSQHLSYSMGYGGEFEKLTPLYKLEQLRTLLPTCIDLPDCCHHLSKRVLHNILPRLTSLRALSLSCYEIVELPNDLFIKLKLLRFLDISRTEIKRLPDSICALYNLETLLLSSCYDLEELPLQMEKLINLRHLDISNTRLLKMPLHLSKLKSLQVLVGAKFLIGGLRMEDLGEVHNLYGSLSVVELQNVVDRREAVKAKMREKNHVDRLYLEWSGSSSADNSQTERDILDELRPHKNIKVVKITGYRGTNFPNWLADPLFLKLVKLSLRNCKNCYSLPALGQLPFLKFLSIREMHGITEVTEEFYGSWSSKKPFNCLEKLEFKDMPEWKQWDLLGSGEFPILEKLLIENCPELSLETVPIQLSSLKSFDVIGSPLVINFPLSILPTTLKRIKISDCQKLKLEQPTGEISMFLEELTLIKCDCIDDISPELLPRARKLWVQDWHNLTRFLIPTATETLDIWNCENVEILSVACGGTQMTSLTIAYCKKLKWLPERMQELLPSLKELHLSNCPEIESFPEGGLPFNLQQLAIRYCKKLVNGRKEWHLQRRLCLTALIIYHDGSDEEIVGGENWELPSSIQRLTIVNLKTLSSQHLKNLTSLQYLFIRGNLPQIQPMLEQGQCSHLTSLQSLQISSLQSLPESALPSSLSHLEISHCPNLQSLPESALPSSLSQLTINNCPNLQSLSESTLPSSLSQLEISFCPNLQYLPLKGMPSSLSELSIYKCPLLKPQLEFDKGEYWPNIAQFPTIKIDRECM

SEQ ID NO: 95 - DNA, 445 bp, Artificial Sequence
  cDNA
atgcgtctggcaattatgctgtctgctacggctgtcgccaaaaactttgcaacctgcagtgcaatcgaccaaaccaaggtcctggtgtatgggacgccagctcactacatacacgattcagccggcagaagacttcttcgcaagaacgaagagaatgaagaaacgtctgaggagcgagccccaaatttcaatttggcgaatctaaatgaggagatgtttaatgtggctgcgttgacgaagagagcagatgccaaaaagctagcgaaacagcttatgggtaatgataagctggcggatgctgcatacatttggtggcagcacaacagggttacgctagaccagattgacacgttcctgaagcttgcaagccgcaagacgcaaggcgcaaagtacaatcagatctacaatagccacatgatgcacctggggctcactggatattagt

SEQ ID NO: 96 - protein, 147 aa, Phytophthora infestans
MRLAIMLSATAVAKNFATCSAIDQTKVLVYGTPAHYIHDSAGRRLLRKNEENEETSEERAPNFNLANLNEEMFNVAALTKRADAKKLAKQLMGNDKLADAAYIWWQHNRVTLDQIDTFLKLASRKTQGAKYNQIYNSHMMHLGLTGY

SEQ ID NO: 97 - DNA, 3852 bp, Artificial Sequence
  cDNA
atggaaattggcttagcagttggtggtgcatttctctcttcagctttgaatgttctctttgacaggcttgctcctaatagtgatctgttgaagatgtttaagagggacaagcgtgatgttcggctcttaaagaagctgaggatgactttgcttggccttcaggctgtgttaagtgatgcggagaataagcaagcatcaaatccatacgtgagccagtggcttaatgagcttcaagatgctgtggacggtgctgaaaacttaattgaagaagtcaattatgaagttttgagactaaaggtggaaggtcagtgtcaaaatcttggagaaacaagcaatcaacaggtaagtgactgcaacctgtgcttgagtgatgatttttttcttaacataaaggagaagttggaagagaccattgaaacattggaagagttggaaaagcaaattggtcgccttgatctaacaaagtatcttgattcgggtaaacaagaaacaagggaatcttcaacttctgttgttgatgaatctgatatcttaggtaggcagaacgaaatagagggattgattgaccgtttgttgtctgaggatggaaagaatctgactgtagttcctgttgttggaatggggggcgtgggcaagacaacacttgctaaagctgtttacaatgatgagaaagtaaaaaaccattttggtttcaaagcttggatctgtgtgtctgaaccatatgatattctcagaataacaaaggagttacttcaagaatttggcttaatggttgataacaatctgaatcaacttcaagtcaaattgaaggagagcttaaagggaaaaaagtttcttattgtcctagatgatgtatggaatgaaaactataaagagtgggatgacttgagaaatctttttgtacaaggagatgtaggaagtaagatcattgtgacgacacgtaaggagagtgttgccttgatgatgggttgtggggcaatcaacgtggggactctatctagtgaagtctcttgggatcttttcaagcggcattcatttgaaaatagggatcctaaggaacatccagaacttgaagagattggaatacaaattgcatacaagtgcaaaggtttgcctttagctctaaaggcacttgctggtattttacgctccaaatcagaggtggatgagtggagacacattttaagaagtgaaatatgggagctgcaaagtcgttcgaatggaatcttaccagcgttgatgttgagctataatgatcttcctccacaattgaagcggtgttttgctttttgtgcaatatatccgaaagattatctattttgcaaagaacaagttgttcacctgtggattgctaatggtcttgtacagcagttgcattcagctaaccaatactttctcgagttgagatcgcgatcattgtttgaaaaggtccgagagtcttctaaatggaattcgggggaattcttaatgcatgaccttgtcaacgatttggcccaaattgcatcttcaaatctgtgtatgaggttggaagagaaccaaggatctcatatgttggaacgaactcgacatttgtcgtattcaatgggtgatggtgatttcggtaaactgaaaaccctcaacaaattggagcaattgaggacattgcttcccatcaatatccagcggcgtccatgccatcttaagaagaggatgcttcatgacatatttccaagactaatatccctaagggcactatcactgtctccttatgatattgaggagttgccgaatgacttgtttatcaaattgaagcacctaaaatttttggacctttcttggacacagataaaaaagttgccagattcaatttgtgaactgtacagcttagagatacttatcttgtcacattgtagtcatcttaatgagccaccgctgcagatggagaagttgatcaacttgcatcacctcgacgttagcgacgcttatttcttgaagacgccgctacatgtgagcaagttgaaaaatctccatgtgctagtgggagctaaattttttcttactggttccagtggtttgagaattgaagatttgggtgaactacataacttgtatggatctctatcaattctagagttgcaacatgtggtagatagaagggaatctctgaaggcaaatatgagggaaaagaaacatgttgaaaggttatctttggagtgggggggaagttttgctgacaattcacaaactgaaagagacatacttgatgagctacaaccaaatacaaacataaaagaactccgaatcactggctatagaggaacaaaatttccaaattggctagctgatcattcatttcataagctaatagaaatgtctcttagctactgcaaggactgtgattccttgccagcactaggacagcttccttgtttaaaatcccttaccattagagggatgcatcaaataacagaggtgagtgaagagttctatggtcgtttttcctccacaaagccatttaactctcttgagaaacttgaatttgcagagatgccggagtggaagcagtggcatgtactggggaagggagagttccctgtactagaggaacttttgatttatcgttgcccaaagttgattgggaagttgcctgaaaatgtttcttcgctgagaagattgagaattttaaaatgccctgaactcagtttggagacacctatccaactttcaaatttaaaagagtttgaagttgctgatgctcaactgtttacatctcaacttgaaggaatgaagcagattgttaaattagatattactgattgtaagtctcttacctccttacctattagcattctgccgagtaccttgaagagaataagaatagctttttgtggggagctgaaattggaggcgtcgatgaatgctatgtttctcgagaaattgtctctagtaaaatgtgattctcctgagttggtcccaagagcacgcaatttgagtgtaagaagttgcaacaaccttactaggcttttgattcctactgccactgaaagactcagtattagagattatgataatcttgaaatactttcagtggcacgtgggactcagatgacatcattgaatatttacgactgcaagaagctgaagtcgctgccagaacatatgcaggaactccttccatctcttaagaaactggttgtgcaagcttgtccagaaatagagtcctttcctgaaggaggattgcccttcaatttacaagccctttcaatctggaattgcaagaaactggtgaatggccgaaaagagtggcatttacagagactcccctctctcatagatttaaccatctaccatgatggtagcgatgaagaggttcttgctggtgaaaaatgggagttgccttgctctattcgaaggcttactatatccaatctgaaaacattaagcagccaacttctcaaaagcctcacctcccttgagtacctagatgctagagagttgcctcaaattcagtcactgctggaagaagggcttcctttctctctttctgagctaatattatttagtaatcatgatcttcattcactaccgacagaaggtcttcagcatctcacgtggcttcgacgtctagagattgtgggttgccctagtctccaatctcttcccgaatcggggttgccctcctccctctctgagctgggcatttggaattgctctaatcttcaatctcttcccgaatcagggatgcccccttccatctctaaactacgcatttccgaatgcccattgctcaaaccactcctagaatttaacaagggggattactggccaaaaattgctcatattcccaccatatatattgataaggaatactag

SEQ ID NO: 98 - protein, 1283 aa, Solanum demissum
MEIGLAVGGAFLSSALNVLFDRLAPNSDLLKMFKRDKRDVRLLKKLRMTLLGLQAVLSDAENKQASNPYVSQWLNELQDAVDGAENLIEEVNYEVLRLKVEGQCQNLGETSNQQVSDCNLCLSDDFFLNIKEKLEETIETLEELEKQIGRLDLTKYLDSGKQETRESSTSVVDESDILGRQNEIEGLIDRLLSEDGKNLTVVPVVGMGGVGKTTLAKAVYNDEKVKNHFGFKAWICVSEPYDILRITKELLQEFGLMVDNNLNQLQVKLKESLKGKKFLIVLDDVWNENYKEWDDLRNLFVQGDVGSKIIVTTRKESVALMMGCGAINVGTLSSEVSWDLFKRHSFENRDPKEHPELEEIGIQIAYKCKGLPLALKALAGILRSKSEVDEWRHILRSEIWELQSRSNGILPALMLSYNDLPPQLKRCFAFCAIYPKDYLFCKEQVVHLWIANGLVQQLHSANQYFLELRSRSLFEKVRESSKWNSGEFLMHDLVNDLAQIASSNLCMRLEENQGSHMLERTRHLSYSMGDGDFGKLKTLNKLEQLRTLLPINIQRRPCHLKKRMLHDIFPRLISLRALSLSPYDIEELPNDLFIKLKHLKFLDLSWTQIKKLPDSICELYSLEILILSHCSHLNEPPLQMEKLINLHHLDVSDAYFLKTPLHVSKLKNLHVLVGAKFFLTGSSGLRIEDLGELHNLYGSLSILELQHVVDRRESLKANMREKKHVERLSLEWGGSFADNSQTERDILDELQPNTNIKELRITGYRGTKFPNWLADHSFHKLIEMSLSYCKDCDSLPALGQLPCLKSLTIRGMHQITEVSEEFYGRFSSTKPFNSLEKLEFAEMPEWKQWHVLGKGEFPVLEELLIYRCPKLIGKLPENVSSLRRLRILKCPELSLETPIQLSNLKEFEVADAQLFTSQLEGMKQIVKLDITDCKSLTSLPISILPSTLKRIRIAFCGELKLEASMNAMFLEKLSLVKCDSPELVPRARNLSVRSCNNLTRLLIPTATERLSIRDYDNLEILSVARGTQMTSLNIYDCKKLKSLPEHMQELLPSLKKLVVQACPEIESFPEGGLPFNLQALSIWNCKKLVNGRKEWHLQRLPSLIDLTIYHDGSDEEVLAGEKWELPCSIRRLTISNLKTLSSQLLKSLTSLEYLDARELPQIQSLLEEGLPFSLSELILFSNHDLHSLPTEGLQHLTWLRRLEIVGCPSLQSLPESGLPSSLSELGIWNCSNLQSLPESGMPPSISKLRISECPLLKPLLEFNKGDYWPKIAHIPTIYIDKEY

SEQ ID NO: 99 - DNA, 447 bp, Artificial Sequence
  cDNA
atgcgagcctactttgtcctactggttgctgcaactgcgatcctgacctatggaggagcgacggccacgtactcgacttcaaagggggagatgaatttaaccggaactgtcgaaaataaccgcccgactcgctctcttcgtgttgcacccagtggcggcaatggtgaagaaagatcgtggtcaaccatttacggaatttctcgatcgaaggcggagactgtgagagattggttgatgccccggcttaaccaaggaatggacgtacaggcgctcgccagagaaatggggattacttcgagacaggcggctacgcagcatcagaactgggacgctctcgtgaagtacctgaagatgtataattacgctgtaaggggcgaaaagatgtcgaaatcgatggctgagagcgtactcctccataacgtcctgaccgcaaagaacaatttctaa

SEQ ID NO: 100 - protein, 148 aa, Phytophthora infestans
MRAYFVLLVAATAILTYGGATATYSTSKGEMNLTGTVENNRPTRSLRVAPSGGNGEERSWSTIYGISRSKAETVRDWLMPRLNQGMDVQALAREMGITSRQAATQHQNWDALVKYLKMYNYAVRGEKMSKSMAESVLLHNVLTAKNNF

SEQ ID NO: 101 - DNA, 2877 bp, Artificial Sequence
  cDNA
atggatattgtcaccggtgccatttccaacctgattcccaagttgggggagctgctcacggaggagttcaagctgcacaagggtgtcaagaaaaatattgaggacctcgggaaggagcttgagagcatgaacgctgccctcatcaagattggtgaggtgccgagggagcagctcgacagccaagacaagctctgggccgatgaagtcagagagctctcctacgtcattgaggatgtcgtcgacaagttcctcgtacaggttgatggcattcagtttgatgataacaacaacaaatttaaggggttcatgaagaggacgaccgagttgttgaagaaagtcaagcataagcatgggatagctcacgcgatcaaggacatccaagagcaactccaaaaggtggctgataggcgtgacaggaacaaggtatttgttcctcatcctacgagaacaattgctattgacccttgccttcgagctttgtatgctgaagcgacagagctagttggcatatatggaaagagggatcaagacctcatgaggttgctttccatggagggcgatgatgcctctaataagagactgaagaaggtctccattgttggatttggagggttgggcaagaccactcttgctagagcggtatacgagaagattaaaggtgatttcgattgtcgggcttttgttccggtcggtcagaaccctcacatgaagaaggttttaagggatatcctcattgatctcggaaatcctcactcagatcttgcgatgctggatgccaatcagcttattaaaaaacttcgtgaatttctagagaacaaaaggtatcttgtcataattgatgatatatgggatgaaaaattatgggaaggcatcaactttgctttctccaataggaataatctaggcagtcggctaatcaccacaacccgcattgtcagtgtctctaattcatgttgctcatcacatggtgattcggtttatcaaatggaaccactttctgttgatgactccagaatactcttctggaaaagaatatttccagatgagaatggatgtctaaatgaatttgaacaagtgtcgagagatattctaaagaaatgtggtggggtaccactagccataattaccatagctagtgctttggccggtgaccagaagatgaaaccaaagtgtgagtgggatattctccttcagtcccttggctctggactaacagaagataacagtttagaggagatgcggagaatactctctttcagctattctaatctaccttctcatctgaaaacttgtctactgtatctatgtatatatccagaagatagcaagattcatagagatgaactgatatggaagtgggtggccgaaggatttgtccaccatgaaaaccaaggaaatagcttgtatttgctcggattaaattacttcaaccagctcattaatagaagtatgatccagcccatatatggttttaatgacgaggtatatgtatgtcgtgtacatgatatggttctggaccttatctgcaacttgtcacgtgaagcaaaatttgtgaatctattggatggcagtgggaatagcatgtcttcacagggtaattgtcgccgtctgtcccttcaaaaaagaaatgaagatcatcaagccaaacctatcacagatatcaagagtatgtcacgagtgaggtcaattactatctttccacctgctattgaagtcatgccatctctttcaaggtttgacgttttacgtgtacttgatctgtcacgatgtaatcttggggagaatagcagcctgcagcttaacctgaaggatgttggacatttaactcacctaaggtaccttggtctagaaggtaccaacatcagtaagctccctgctgagataggaaaactgcagtttttggaggtgttggatcttggaaacaatcataatctaaaggaattgccgtccactgtttgtaatttcagaagattaatctacctaaatttatttgggtgtccggtggttcctccagttggtgtgttgcaaaatctgacatccatagaagtgttgagggggatcttggtctctgtgaacattattgcacaagagcttggcaacctggaaaggctgagggtgcttgatatttgcttcagggatggtagtttggatttgtataaagatttcgtgaagtctctgtgcaacctacatcacatcgaaagtctacgtattgagtgcaattccagagaaacatcatcttttgaactggtggatctcttgggagaacgctgggtgcctcctgtacatttccgtgaatttgtgtcatccatgcctagccaactctctgcactgcgagggtggataaagagagacccctcccatctctcgaacctctccgagttaatcctctcgtcagtgaaggacgtgcagcaggatgacgtggaaatcattggggggttgttgtgccttcgtcgtctctttataataacgagcaccgaccaaacgcaacggctgctagtcatccgtgcagatgggttccgctgtacggttgactttcgattggattgtggatctgccacgcagatattgtttgaaccaggagctttgccaagggcggtaagagtttggttcagccttggcgtgcgggtgacgaaagaggatggtaaccgtggcttcgacttgggcctgcaggggaacctgttctcccttcgagagtttgtctctgtttatatgtattgtggtggagcgagggttggggaggcaaaggaagcggaggctgcggtgaggcgtgccctggaagctcatcccagccatccccggatttatattcagatgaggccgcatatagcaaaaggtgctcatgatgacgatttgtgtgaggacgaggaggagaactga

SEQ ID NO: 102 - protein, 958 aa, Hordeum vulgare
MDIVTGAISNLIPKLGELLTEEFKLHKGVKKNIEDLGKELESMNAALIKIGEVPREQLDSQDKLWADEVRELSYVIEDVVDKFLVQVDGIQFDDNNNKFKGFMKRTTELLKKVKHKHGIAHAIKDIQEQLQKVADRRDRNKVFVPHPTRTIAIDPCLRALYAEATELVGIYGKRDQDLMRLLSMEGDDASNKRLKKVSIVGFGGLGKTTLARAVYEKIKGDFDCRAFVPVGQNPHMKKVLRDILIDLGNPHSDLAMLDANQLIKKLREFLENKRYLVIIDDIWDEKLWEGINFAFSNRNNLGSRLITTTRIVSVSNSCCSSHGDSVYQMEPLSVDDSRILFWKRIFPDENGCLNEFEQVSRDILKKCGGVPLAIITIASALAGDQKMKPKCEWDILLQSLGSGLTEDNSLEEMRRILSFSYSNLPSHLKTCLLYLCIYPEDSKIHRDELIWKWVAEGFVHHENQGNSLYLLGLNYFNQLINRSMIQPIYGFNDEVYVCRVHDMVLDLICNLSREAKFVNLLDGSGNSMSSQGNCRRLSLQKRNEDHQAKPITDIKSMSRVRSITIFPPAIEVMPSLSRFDVLRVLDLSRCNLGENSSLQLNLKDVGHLTHLRYLGLEGTNISKLPAEIGKLQFLEVLDLGNNHNLKELPSTVCNFRRLIYLNLFGCPVVPPVGVLQNLTSIEVLRGILVSVNIIAQELGNLERLRVLDICFRDGSLDLYKDFVKSLCNLHHIESLRIECNSRETSSFELVDLLGERWVPPVHFREFVSSMPSQLSALRGWIKRDPSHLSNLSELILSSVKDVQQDDVEIIGGLLCLRRLFIITSTDQTQRLLVIRADGFRCTVDFRLDCGSATQILFEPGALPRAVRVWFSLGVRVTKEDGNRGFDLGLQGNLFSLREFVSVYMYCGGARVGEAKEAEAAVRRALEAHPSHPRIYIQMRPHIAKGAHDDDLCEDEEEN

SEQ ID NO: 103 - DNA, 357 bp, Artificial Sequence
  cDNA
atgaaattttatcactcatcatttgtttcaaacttgacaatactatctttgttcttgaacattaatggcgctttttcacgaacgtggcaatgcccaagcggtgacatactttatgaagaagatgtttattcacatacaaatatgaattcctttgaacactttccgtttaaaactatagaggatgaagtctatgaaaacactagtttgagtcgcggtgtcgtttacaaggtattggatgtgcatccttcgtcatctagcgcaacaacttttgctgtctttacttcaaataaacgagtggcagtagtataccaacagggctatcgaaataaccgaaaattcattgaagaatgcacctag

SEQ ID NO: 104 - protein, 118 aa, Blumeria graminis
MKFYHSSFVSNLTILSLFLNINGAFSRTWQCPSGDILYEEDVYSHTNMNSFEHFPFKTIEDEVYENTSLSRGVVYKVLDVHPSSSSATTFAVFTSNKRVAVVYQQGYRNNRKFIEECT

SEQ ID NO: 105 - DNA, 2880 bp, Artificial Sequence
  cDNA
atggatattgtcaccggtgccatttccaacctgattcccaagttgggggagctactcacggaggagttcaagctgcacaagggtgtcaagaaaaatattgaggacctcgggaaggagcttgagagcatgaacgctgccctcatcaagattggtgaggtgccgagggagcagctcgacagccaagacaagctctgggccgatgaggtcagagagctctcctacgtcattgaggatgtcgtcgacaagttcctcgtacaggttgatggcattaagtctgatgataacaacaacaaatttaaggggctcatgaagaggactaccgagttgttgaagaaagtcaagcataagcatgggatagctcacgcgatcaaggacatccaagagcaactccaaaaggtggctgataggcgtgacaggaacaaggtatttgttcctcatcctacgagaacaattgctattgacccttgccttcgagctttgtatgctgaagcgacagagctagttggcatatatggaaagagggatcaaggcctcatgaggttgctttccatggagggcgatgatgcctctaataagagactgaagaaggtctccattgttggatttggagggttgggcaagaccactcttgctagagcggtatacgagaagattaaaggtgatttcgattgtcgggcatttgttccggtcggtcagaaccctgacatgaagaaggttttaagggatatcctcattgatctcggaaatcctcactcagatcttgcgatgctggatgccaatcagcttattaaaaagcttcatgaatttctagagaacaaaaggtatcttgtcataattgatgatatatgggatgaaaaattgtgggaaggcatcaactttgctttctccaataggaataatctaggcagtcggctaatcaccacaacccgcattgtcagtgtctctaattcatgttgctcatcagatggtgattctgtttatcaaatggaaccgctttctgttgatgactccagaatgctcttctacaaaagaatatttcctgatgagaatgcatgtataaatgaatttgaacaagtatccagagatattctaaagaaatgtggtggggtaccactagccataattactatagctagtgctttggctggtgaccagaagatgaaaccaaaatgtgagtgggatattctccttcggtcccttggctctggactaacagaagataacagtttagaggagatgcggagaatactctctttcagctattctaatctaccttcgaatctgaaaacttgtctactgtatctatgtgtatatccagaagatagtatgatttctagagataaactgatatggaagtgggtggccgaaggatttgtccaccatgaaaatcaaggaaatagcctgtatttgctcggattaaattacttcaaccagctcattaatagaagtatgatccagccaatatataattatagcggcgaggcatatgcttgccgtgtacatgatatggttctggaccttatctgcaacttgtcaaatgaagcaaagtttgtgaatctattggatggcactgggaatagcatgtcttcacagagtaattgtcgccgtttgtcccttcagaaaagaaatgaagatcatcaagccaggcctttcacagatatcaagagtatgtcacgagtgaggtcaattactatctttccatctgctattgaagtcatgccatctctttcaaggtttgacgttttacgtgtacttgatctgtcacgatgtaatcttggggagaatagcagcatgcagcttaacctcaagggtgttggacatttaactcacctaaggtaccttggtctagaaggtaccaacatcagtaagctccctgctgagataggaaaactgcagtttttggaggtgttggatcttgaaaacaatcataatctaaaggaattgccgtccacagtttgtaatttcagaagattaatctacctaaatttagttggctgtcaggtggttcctccagttggtgtgttgcaaaatctgacatccatagaagtgttgagtggtatcttggtctctctgaacattattgcacaagagcttggcaacttgaaaaggctgagggagcttaacattctcttcaatgatggtagtttggatttgtatgaaggttttgtgaagtctctttgcaacctacatcacatcgaaagcctaatcattggttgcaattctagagaaacatcatcttttgaactgatggatctcctgggggaacgctgggtgcctcctgtacatttccgtgaatttgtgtcatccatgcctagccaactctctgcactgcgagggtggataaagagagacccctcccatctctcgaacctctccgagttaatcctcacatcagtgaaggaggtgcagcaggatgacgtggtaatcattggggccttgtcgtcccttcgccgtctctgcataaagagcacctaccaaacacaacggctgctagtcatccctgcagatgggttccgctgtattgttggctttcatttggattgtggatctgccacacagatattgtttgagcctggagctttgccgagggcagaatcagttgtgatcagtctcggcgtgcgggtggcgaaagaggatggtaaccgtggcttcgacttgggcctgcaggggaacctgctctcccttcggcgggatgtctttgtttctatctattgtggtggagcgagggttggggaggcaaaggaagcggaggctgcggtgaggcgtgccctcgacgcccatcccagccatcccccgatttattttgagatgaggccgcatatagcaaaaggtgctcatgatgatgatttgtgtgaggagaggaggagaactgatttctga

SEQ ID NO: 106 - protein, 959 aa, Hordeum vulgare
MDIVTGAISNLIPKLGELLTEEFKLHKGVKKNIEDLGKELESMNAALIKIGEVPREQLDSQDKLWADEVRELSYVIEDVVDKFLVQVDGIKSDDNNNKFKGLMKRTTELLKKVKHKHGIAHAIKDIQEQLQKVADRRDRNKVFVPHPTRTIAIDPCLRALYAEATELVGIYGKRDQGLMRLLSMEGDDASNKRLKKVSIVGFGGLGKTTLARAVYEKIKGDFDCRAFVPVGQNPDMKKVLRDILIDLGNPHSDLAMLDANQLIKKLHEFLENKRYLVIIDDIWDEKLWEGINFAFSNRNNLGSRLITTTRIVSVSNSCCSSDGDSVYQMEPLSVDDSRMLFYKRIFPDENACINEFEQVSRDILKKCGGVPLAIITIASALAGDQKMKPKCEWDILLRSLGSGLTEDNSLEEMRRILSFSYSNLPSNLKTCLLYLCVYPEDSMISRDKLIWKWVAEGFVHHENQGNSLYLLGLNYFNQLINRSMIQPIYNYSGEAYACRVHDMVLDLICNLSNEAKFVNLLDGTGNSMSSQSNCRRLSLQKRNEDHQARPFTDIKSMSRVRSITIFPSAIEVMPSLSRFDVLRVLDLSRCNLGENSSMQLNLKGVGHLTHLRYLGLEGTNISKLPAEIGKLQFLEVLDLENNHNLKELPSTVCNFRRLIYLNLVGCQVVPPVGVLQNLTSIEVLSGILVSLNIIAQELGNLKRLRELNILFNDGSLDLYEGFVKSLCNLHHIESLIIGCNSRETSSFELMDLLGERWVPPVHFREFVSSMPSQLSALRGWIKRDPSHLSNLSELILTSVKEVQQDDVVIIGALSSLRRLCIKSTYQTQRLLVIPADGFRCIVGFHLDCGSATQILFEPGALPRAESVVISLGVRVAKEDGNRGFDLGLQGNLLSLRRDVFVSIYCGGARVGEAKEAEAAVRRALDAHPSHPPIYFEMRPHIAKGAHDDDLCEERRRTDF

SEQ ID NO: 107 - DNA, 4022 bp, Hordeum vulgare
atggatattgtcaccggtgccatttccaacctgattcccaagttgggggagctactcacggaggagttcaagctgcacaagggtgtcaagaaaaatattgaggacctcgggaaggagcttgagagcatgaacgctgccctcatcaagattggtgaggtgccgagggagcagctcgacagccaagacaagctctgggccgatgaggtcagagagctctcctacgtcattgaggatgtcgtcgacaagttcctcgtacaggttgatggcattaagtctgatgataacaacaacaaatttaaggggctcatgaagaggactaccgagttgttgaagaaagtcaagcataagcatgggatagctcacgcgatcaaggacatccaagagcaactccaaaaggtggctgataggcgtgacaggaacaaggtatttgttcctcatcctacgagaacaattgctattgacccttgccttcgagctttgtatgctgaagcgacagagctagttggcatatatggaaagagggatcaaggcctcatgaggttgctttccatggagggcgatgatgcctctaataagagactgaagaaggtctccattgttggatttggagggttgggcaagaccactcttgctagagcggtatacgagaagattaaaggtgatttcgattgtcgggcatttgttccggtcggtcagaaccctgacatgaagaaggttttaagggatatcctcattgatctcggaaatcctcactcagatcttgcgatgctggatgccaatcagcttattaaaaagcttcatgaatttctagagaacaaaaggtatgcatcaatttagaaaaaagtacactattatgtgatgtttgtttcctatgctagtggaacggattagaatattttttttcattaaggtcacctttactggcataagcagttcacactaaacagtaaaccttataggtgaaaattttcaggcatatatatatatatatatatatatatatatatatatatatatatatatatatatatgtttgattctttccggcttaacaaaataattagcaagtacttcttgttgcatttgttccaacggctgaatttattggcatcagtccaagaaatccatctaaacgttttacatttcaccaaagtgtgtgtcatgacagatgtaacaaataataaaccaaaaggagaggaaggaaagagggagataaatgttacaaaaatttaaatcaaacttatttctacctttctccttacctacccagttgtaaaacacatatatattttaaagagaggcaacatgcgccaaaggctgcccttgaaaattcctaaaatattgtacatttgactcatgaccaaacaaaaaggtaaattgtctcttccttatcgcattatatttccatgcatgcctttttctggaaacttactatcagcaaaatttagacgaaaggatgatgccacataatttcagtctccaagagatttgttagttgccatatattaaattggtgtgccaacctatacctgggccttttttatgtatctacttgatcatttgaacttctgtagttaattgtattctatgaatgatcactcatccaaaaacttgctatttgtgtttcactttcttgagtcttgaatatttattcattttgttcatcatacgattggaggcccataatggatgcttaatgagagtaagattatcgagctccaaacacatgcttcttactagtgtttgaatatatagccttatagatgtatagttcaacccatagattcatatgaccctcagctttctgatgtgtatatataaccttacactgacactccgaaataatgtaggtatcttgtcataattgatgatatatgggatgaaaaattgtgggaaggcatcaactttgctttctccaataggaataatctaggcagtcggctaatcaccacaacccgcattgtcagtgtctctaattcatgttgctcatcagatggtgattctgtttatcaaatggaaccgctttctgttgatgactccagaatgctcttctacaaaagaatatttcctgatgagaatgcatgtataaatgaatttgaacaagtatccagagatattctaaagaaatgtggtggggtaccactagccataattactatagctagtgctttggctggtgaccagaagatgaaaccaaaatgtgagtgggatattctccttcggtcccttggctctggactaacagaagataacagtttagaggagatgcggagaatactctctttcagctattctaatctaccttcgaatctgaaaacttgtctactgtatctatgtgtatatccagaagatagtatgatttctagagataaactgatatggaagtgggtggccgaaggatttgtccaccatgaaaatcaaggaaatagcctgtatttgctcggattaaattacttcaaccagctcattaatagaagtatgatccagccaatatataattatagcggcgaggcatatgcttgccgtgtacatgatatggttctggaccttatctgcaacttgtcaaatgaagcaaagtttgtgaatctattggatggcactgggaatagcatgtcttcacagagtaattgtcgccgtttgtcccttcagaaaagaaatgaagatcatcaagccaggcctttcacagatatcaagagtatgtcacgagtgaggtcaattactatctttccatctgctattgaagtcatgccatctctttcaaggtttgacgttttacgtgtacttgatctgtcacgatgtaatcttggggagaatagcagcatgcagcttaacctcaagggtgttggacatttaactcacctaaggtaccttggtctagaaggtaccaacatcagtaagctccctgctgagataggaaaactgcagtttttggaggtgttggatcttgaaaacaatcataatctaaaggaattgccgtccacagtttgtaatttcagaagattaatctacctaaatttagttggctgtcaggtggttcctccagttggtgtgttgcaaaatctgacatccatagaagtgttgagtggtatcttggtctctctgaacattattgcacaagagcttggcaacttgaaaaggctgagggagcttaacattctcttcaatgatggtagtttggatttgtatgaaggttttgtgaagtctctttgcaacctacatcacatcgaaagcctaatcattggttgcaattctagagaaacatcatcttttgaactgatggatctcctgggggaacgctgggtgcctcctgtacatttccgtgaatttgtgtcatccatgcctagccaactctctgcactgcgagggtggataaagagagacccctcccatctctcgaacctctccgagttaatcctcacatcagtgaaggaggtgcagcaggatgacgtggtaatcattggggccttgtcgtcccttcgccgtctctgcataaagagcacctaccaaacacaacggctgctagtcatccctgcagatgggttccgctgtattgttggctttcatttggattgtggatctgccacacagatattgtttgagcctggagctttgccgagggcagaatcagttgtgatcagtctcggcgtgcgggtggcgaaagaggatggtaaccgtggcttcgacttgggcctgcaggggaacctgctctcccttcggcgggatgtctttgtttctatctattgtggtggagcgagggttggggaggcaaaggaagcggaggctgcggtgaggcgtgccctcgacgcccatcccagccatcccccgatttattttgagatgaggccgcatatagcaaaaggtacgcatcctgcacctaactaattacttgtgcacttacacatgtgtttttttctcaatgacggactaaccttattactttctgcgtggattttgatctctaaatctcccaaggtgctcatgatgatgatttgtgtgaggagaggaggagaactgatttctga

SEQ ID NO: 108 - DNA, 369 bp, Artificial Sequence
  cDNA
atgaaaacttttcaatttgcttctattgttgcaggacttagttttctgaagacgacaattgctgctggcgatggttatattacccttggtatggggtcaattcataaaaatgatatctatagagtcgccgaacatatgtggacgatagatgcctacagtgttccctcgaataatcatggtagctatcctatttttggggaagaaataaacggctcggtaacacggatatttccaatagtctataatggcgacgactggcgtagtggagatttttattattcggttgaatcaaccgaagatttgagttatatcaaactccgttacaatggtgcgagatatgagacctgtatggtttcaagccctgaatag

SEQ ID NO: 109 - protein, 122 aa, Blumeria graminis
MKTFQFASIVAGLSFLKTTIAAGDGYITLGMGSIHKNDIYRVAEHMWTIDAYSVPSNNHGSYPIFGEEINGSVTRIFPIVYNGDDWRSGDFYYSVESTEDLSYIKLRYNGARYETCMVSSPE

SEQ ID NO: 110 - DNA, 3654 bp, Artificial Sequence
  cDNA
atggcactagaattggttggtggtgctcttctttctgctttccttcaggttgcgtttgagaagcttgcttctcctcaagttctggacttctttcgtggaagaaagcttgatcaaaagctgctcaacaacttggaaatcaagctgaactccatacaggctctggctaatgatgcagaactaaagcagttcagagatccacttgtcagaaactggcttcttaaggtcaaagatgctgtgtttgacgcagaggatatcttggatgaaatacaacatgagatctccaaatgccaggtcgaagctgaagctgaagctgagtctcaaacctgcacttgcaaggtaccaaatttcttcaaatcttctcctgctagttcctttaacagggaaattaaatccaggatggaagaaatccttgatagattagatcttctctcaagccaaaaggatgatctaggcttgaaaaattctagtggtgttggcgttggatcagaattgggtagtgcagtaccacagatatcacaatcaacatcttcagttgttgaaagtgatatttatggcagagataaagacaaaaaaatgatttttgattggctgacatctgacaatggcaatcctaaccagccatcgatactttctattgtgggcatgggtgggatgggtaagaccacacttgctcaacatgtattcaatgaccctaggatcgaggaggctagatttgatgtcaaagcttgggtctgtgtttcagatgattttgatgctttcagggtaacaagaacaattcttgaggccatcactaaatcgactgatgatagtagagacctagagatggttcacggaagattgaaagaaaaattgacggggaagagatttcttcttgttttggatgacgtttggaacgaaaaccgacttaaatgggaagctgtgctaaaacatcttggttttggggctcaggggagtagaattattgccaccacacgtagtaaggaagttgcttctaccatgaggtcaaaagaacacctcctggagcaattacaagaagatcattgctggaagttgtttgctaaacatgcattccaagatgataatattcaaccaaatccagattgcaaggagattggtatgaagatagttgaaaaatgtaaaggacttcctctggccttgaaaacaatgggaagtctattacacaacaagtcatctgttacggaatggaaaagcatattgcagagcgagatatgggaattttcaacagagcgtagtgatattgtacctgctttagcactaagctatcaccatcttccttctcatctcaagagatgttttgcttattgtgccttattccccaaagattatgagtttgataaggagtgcttaatacaattgtggatggctgaaaaatttctacaatgttctcaacagggtaagagtccaggagaagttggtgaacaatacttcaatgatctattatcaaggtgcttctttcaacaatcaagcaacacagagagaacagattttgtcatgcatgaccttctcaacgatttggcaagatttatttgtggggacatttgtttcagattggatgggaatcaaacaaaaggtacaccaaaagcaacccgtcattttttaattgacgttaaatgttttgatgggtttggaactctatgtgacacaaaaaagttacgtacttatatgccaacaagttacaaatattgggattgcgagatgtcaatacacgaattgttctccaagtttaattacttacgtgtcttatctctgtttgattgtcatgacctaagagaggtgcctgactctgtgggtaatctcaaatatctccgttcgttagacttatccaatactaaaatagaaaaactacctgaatcaatatgttcactctacaacttgcaaatactgaagctaaatggttgtagacatttgaaggagctgccctcaaatttgcataaactcactgatttgcatcggcttgaattaatagaaactggagtgagaaaggtaccagcacatttgggaaaactggagtatcttcaagtattaatgagttcgtttaatgttggcaaaagtagggagttcagtatccagcagttaggagaactcaatcttcatggaagtctatcaataaggcaactgcagaatgttgagaatccatcagatgcattagcggtggatttaaaaaataaaacacaccttgtcgagctagagttagaatgggattcagactggaaccctgatgattcaacaaaagaaagggatgtaatcgagaatctacagccttccaaacacttggagaagttgaggatgaggaactatgggggtactcaatttccaaggtggttattcaacaattcatcatgtagtgtggtgtccttaaccttgaagaactgtaaatattgcctatgtttgcctccccttggacttttgccatctctgaaggaactttcaattaaagggcttgatgggatcgtgagtatcaatgctgattttttcgggagtagctcttgttcatttacatccttgaaatctttggagttctaccatatgaaggaatgggaagaatgggaatgtaaaggtgtgacaggtgcttttccacgtcttcaacgtctttctatagagcgttgtcccaagctgaaagggcacttgccagagcaactatgtcatttaaattctctaaagatttctgggtgtgaacaacttgtaccttctgctctcagtgcccctgatattcataaattatacctaggagactgtggagagctgcaaattgatcatgggacaactttgaaagagcttaccattgaaggtcacaacgtggaggcagccttattcgaagagattgggcgcaattactcttgttcaaataacaatattcccatgcacagttgctatgatttccttgtaagcttgcgcatcaaaggtggctgcgactctttaacgacctttccgctagatatgttcacaatactcagggaactttgtatctggaagtgtcctaatctacggaggatttcacaagggcaggctcataatcatctccagactctggatatcaaagagtgcccccaattagaatcattgcctgaaggaatgcatgtcctccttccatctcttgattctctgtgcatagatgattgtccaaaagttgaaatgtttcccgaaggaggtttgccatcaaatttaaaagaaatgggtctctttggtggtagttacaaacttatgtccttattgaaaagtgccttgggaggcaatcactctctagaacggttagttattggaaaagtggattttgagtgtcttcctgaggaaggtgtactgccacactctcttgtttctctacagatcaatagctgtggagatcttaaaagactggactacaaaggtatctgccacctctcctctctcaaggaattgagtcttgaagactgccccaggctccaatgcttaccagaggagggtctgcccaaatccatttcatctttgtggatttggggggactgtcagttgctcaaagaacgttgccgggaacccgaaggcgaagactggccaaagattgctcacttttgcccgttgctcaatcaacgttgccgggaacccggaggcgaagactggccaaagattgctgacattgaaaacgtgtatataaggtag

SEQ ID NO: 111 - protein, 1217 aa, Glycine max
MALELVGGALLSAFLQVAFEKLASPQVLDFFRGRKLDQKLLNNLEIKLNSIQALANDAELKQFRDPLVRNWLLKVKDAVFDAEDILDEIQHEISKCQVEAEAEAESQTCTCKVPNFFKSSPASSFNREIKSRMEEILDRLDLLSSQKDDLGLKNSSGVGVGSELGSAVPQISQSTSSVVESDIYGRDKDKKMIFDWLTSDNGNPNQPSILSIVGMGGMGKTTLAQHVFNDPRIEEARFDVKAWVCVSDDFDAFRVTRTILEAITKSTDDSRDLEMVHGRLKEKLTGKRFLLVLDDVWNENRLKWEAVLKHLGFGAQGSRIIATTRSKEVASTMRSKEHLLEQLQEDHCWKLFAKHAFQDDNIQPNPDCKEIGMKIVEKCKGLPLALKTMGSLLHNKSSVTEWKSILQSEIWEFSTERSDIVPALALSYHHLPSHLKRCFAYCALFPKDYEFDKECLIQLWMAEKFLQCSQQGKSPGEVGEQYFNDLLSRCFFQQSSNTERTDFVMHDLLNDLARFICGDICFRLDGNQTKGTPKATRHFLIDVKCFDGFGTLCDTKKLRTYMPTSYKYWDCEMSIHELFSKFNYLRVLSLFDCHDLREVPDSVGNLKYLRSLDLSNTKIEKLPESICSLYNLQILKLNGCRHLKELPSNLHKLTDLHRLELIETGVRKVPAHLGKLEYLQVLMSSFNVGKSREFSIQQLGELNLHGSLSIRQLQNVENPSDALAVDLKNKTHLVELELEWDSDWNPDDSTKERDVIENLQPSKHLEKLRMRNYGGTQFPRWLFNNSSCSVVSLTLKNCKYCLCLPPLGLLPSLKELSIKGLDGIVSINADFFGSSSCSFTSLKSLEFYHMKEWEEWECKGVTGAFPRLQRLSIERCPKLKGHLPEQLCHLNSLKISGCEQLVPSALSAPDIHKLYLGDCGELQIDHGTTLKELTIEGHNVEAALFEEIGRNYSCSNNNIPMHSCYDFLVSLRIKGGCDSLTTFPLDMFTILRELCIWKCPNLRRISQGQAHNHLQTLDIKECPQLESLPEGMHVLLPSLDSLCIDDCPKVEMFPEGGLPSNLKEMGLFGGSYKLMSLLKSALGGNHSLERLVIGKVDFECLPEEGVLPHSLVSLQINSCGDLKRLDYKGICHLSSLKELSLEDCPRLQCLPEEGLPKSISSLWIWGDCQLLKERCREPEGEDWPKIAHFCPLLNQRCREPGGEDWPKIADIENVYIR

SEQ ID NO: 112 - DNA, 966 bp, Artificial Sequence
  cDNA
atgggctgcgtctcgtcaaaaagcaccacagtgctttctccacagacatcttttaatgaagcctcccgtacgtctttcagagcactccccggcccatcgcaaagacaattggaggtctatgatcaatgcttaattggtgcagcgcgctggcctgacgattccagtaagtcgaatacgcctgaaaacagggcatattgtcagagcatgtacaactcaattcgctctgctggagatgaaatttccagaggtggaatcacatcttttgaggaactatgggggcgcgcaactgaatggcgactttcaaagttgcagagaggagagccgttatactctgcattcgcctccgaaaggacgtccgatacagacgcagtaacccctctggtcaaaccttacaagtctgtccttgccagagtcgttgatcacgaggatgcccacgatgaaataatgcaggacaatttgtttggcgatctgaatgttaaagtatatcgccaaacagcatacctccatggaaatgttattccacttaacacttttcgcgtcgcgacagatactgaatatctgagagatcgagtagcgcatctgagaacagagttgggcgcaaaagctcttaaacagcatttgcagagatacaatcctgatagaatagaccatacgaacgcttcctatttacccataataaaagatcatttaaatgatctttacagacaagcaatatcttccgatttaagccaagccgaattgataagcctgatagcccgtacccattggtgggctgcgagtgcaatgcctgaccaaagaggtagtgctgctaaggccgagtttgcagctagagccatagctagcgcacatggtatagagctcccgccttttcgaaatggtaacgtttcggatatagaagcgatgctcagcggagaggaggaattcgtagaaaaatacagaagcttgctagattctgattgcttttaa

SEQ ID NO: 113 - protein, 321 aa, Pseudomonas syringae
MGCVSSKSTTVLSPQTSFNEASRTSFRALPGPSQRQLEVYDQCLIGAARWPDDSSKSNTPENRAYCQSMYNSIRSAGDEISRGGITSFEELWGRATEWRLSKLQRGEPLYSAFASERTSDTDAVTPLVKPYKSVLARVVDHEDAHDEIMQDNLFGDLNVKVYRQTAYLHGNVIPLNTFRVATDTEYLRDRVAHLRTELGAKALKQHLQRYNPDRIDHTNASYLPIIKDHLNDLYRQAISSDLSQAELISLIARTHWWAASAMPDQRGSAAKAEFAARAIASAHGIELPPFRNGNVSDIEAMLSGEEEFVEKYRSLLDSDCF

SEQ ID NO: 114 - DNA, 663 bp, Artificial Sequence
  cDNA
atgggctgtgtatcgagcacttcaagaagtactggatattattccggttacgaaaatcatgaggagccaagggtggcaagtagcccgacgaacaggcatgatcgcggctacgaaaccgattccgagcattccaatgttaacttaatacccaatgcgaggagagtgtataaagagtctgttttgtggcatggtacatctatgcaatcaaaaatagatttgagaaggcaagggtttgatgtgaatagaaaaactgatggtgcaaccgagggatctagaacatcgaactcagcccctacagacacgctcatcagaaatgctagacgtcacaactacttaacagcgtatgatgtaacagctaagaattatgctcgaagagcagaccccgaatccccagccctagttagaactataggtgtcaagagcaattttaatattgagctagatcctgaatcgaaagacgagaatggtgaaatatcccaattcagctgcagaacgacagattcaatacctaaaaaatacattgttggaagcaagagcagccagccgggagcagatgcaaaggtttttaaaaaagaactctccaatgcgggctttgaagtttccacaagccgtgcaggcgagttattaagagctgttcagtctgactcagaagatgacttttaa

SEQ ID NO: 115 - protein, 220 aa, Pseudomonas syringae
MGCVSSTSRSTGYYSGYENHEEPRVASSPTNRHDRGYETDSEHSNVNLIPNARRVYKESVLWHGTSMQSKIDLRRQGFDVNRKTDGATEGSRTSNSAPTDTLIRNARRHNYLTAYDVTAKNYARRADPESPALVRTIGVKSNFNIELDPESKDENGEISQFSCRTTDSIPKKYIVGSKSSQPGADAKVFKKELSNAGFEVSTSRAGELLRAVQSDSEDDF

SEQ ID NO: 116 - DNA, 663 bp, Artificial Sequence
  cDNA
atgggctgtgtatcgagcacttcaagaagcactggatattattccggttacgaaagtcatgaggagccaagggtggcaagtagcccggcaaacaggcatgatcgcggctacgaaactgattccgaacattccaatgacaacttaattcccaatgcgaggagagtgtatagagagtctgttttgtggcatggtacatctatgcaatcaaaaatagatttgagaaggcaagggtttgatgtgaatagaaaaactgatggtgcaaccgagggatctagaacatcgagctcagccccgacagacatgctcgtcagaaatgctagacttcacaactacttaacagcgtatgatgtaactgctaagaattatgctcgaagagcagaccccgaatccccagccctagttagaactataggtgtcaggagcaattttaatattgagctagatcctgaatcgaaagacgagaatggtgaaatatcccaattcagctgcagaacgacagattcaatacctaaaaaatacattgttggaagcaagagcagccagccgggagcggatgcaaaggtttttaaaacagaactctccaatgcgggttttgaagtttccacaagccgtgcaggcgagttattaagagctgttcagtctgactcagaagatgacttttaa

SEQ ID NO: 117 - protein, 220 aa, Pseudomonas syringae
MGCVSSTSRSTGYYSGYESHEEPRVASSPANRHDRGYETDSEHSNDNLIPNARRVYRESVLWHGTSMQSKIDLRRQGFDVNRKTDGATEGSRTSSSAPTDMLVRNARLHNYLTAYDVTAKNYARRADPESPALVRTIGVRSNFNIELDPESKDENGEISQFSCRTTDSIPKKYIVGSKSSQPGADAKVFKTELSNAGFEVSTSRAGELLRAVQSDSEDDF

SEQ ID NO: 118 - DNA, 2781 bp, Artificial Sequence
  cDNA
atggcttcggctactgttgattttgggatcggacggattcttagtgtcctggaaaacgagaccttgttattgtcaggagtccatggtgagattgataaaatgaagaaggagttgctgatcatgaagtcctttcttgaggatactcataaacatggtggaaatggatccacaacaacaacaactcaactcttccaaacttttgtggcaaacacgagagatttggcttaccaaatcgaagacattctcgacgagtttggctatcacatccacggttatcgtagctgcgccaaaatttggcgtgcgtttcatttcccgaggtatatgtgggcgaggcactcgatagctcaaaagctaggaatggttaatgtcatgattcaatccatttctgattccatgaaaaggtactatcattcagaaaactaccaagcagcattattaccgcctattgatgatggcgatgcaaagtgggtgaacaacatcagtgagtcatctcttttctttagtgaaaatagtcttgtagggattgatgcacccaagggaaagctcatcggacggcttctaagtcccgaacctcagcggattgttgtcgcggtggttgggatgggcggttcagggaaaactacactctcagcgaatatcttcaagtctcaaagtgtgcggaggcattttgagtcttacgcttgggttacaatctcgaaatcttatgtgattgaagatgtgtttaggaccatgatcaaggagttttacaaagaagcagatacacagattccagctgaattatactccttaggctacagagagttggtggaaaaacttgtggagtatttgcagtcgaagaggtacattgttgtgcttgatgatgtatggaccactggtctatggagggagataagtattgctttaccagatggtatttatggaagtcgtgttatgatgactactcgggacatgaacgtggcttctttcccatatggaattgggagcacaaagcacgagattgagctcttaaaagaagacgaagcttgggtgcttttctccaacaaagcttttccggcaagtcttgagcaatgcagaacgcagaatttggagccgatagcacgaaaattagtcgagagatgtcagggtttgccattagctattgcttctttgggaagcatgatgtcaaccaagaagtttgaatcagaatggaagaaagtctacagtactttaaactgggaactgaacaacaatcatgaactcaagattgttcgaagcattatgttccttagcttcaatgatttgccatacccgcttaaacgttgtttcttatattgttctcttttccctgtgaactatcggatgaaaagaaagaggctcattaggatgtggatggcacaaaggtttgtggaaccgatcagaggagtgaaagcagaagaagtggctgatagttacctcaatgaacttgtttacagaaatatgcttcaagttatcttgtggaatccttttggacgacccaaggcgttcaagatgcatgacgtgatatgggagattgctctatctgtatccaaacttgagaggttctgtgatgtatataatgatgacagtgatggtgatgatgctgcagaaacaatggagaattacggtagtcgccatttatgcattcagaaagagatgacacctgatagtatacgtgcaacaaaccttcactctcttttggtttgctcttctgctaaacacaagatggaattacttccaagtctgaaccttctgagagccttagaccttgaagactcttccatcagcaagttaccagattgtttagtaactatgttcaacttaaagtacttgaatttgtccaagacacaggtgaaagaactgccaaaaaacttccataaactcgtcaatttggagacgttgaacacaaagcactccaagattgaggaacttcctctagggatgtggaaattgaagaagttgcgatatctcattacttttcgccgcaatgaaggacatgattccaattggaattatgttttaggtacaagggttgttcctaaaatctggcagttgaaggatttgcaagtcatggactgcttcaacgcagaagatgagcttatcaaaaatctcgggtgtatgactcagctcacaagaataagtcttgtcatggttaggagagaacatggaagagacttgtgcgattcactgaataagattaaaagaattcgattcttatctttaacgtcgattgatgaagaggaaccgttagagatagatgacctgatcgcaactgcaagcattgagaagctctttcttgctgggaaactggagagagtaccaagttggttcaacactcttcaaaaccttacctatttgggtttgcgtggatctcagctacaggaaaacgccattctctctatccaaacgcttcctagattggtatggctttcattttacaatgcatacatgggacctaggttgcgttttgcacaaggatttcagaatctgaagattctagagatagttcagatgaaacatctgacagaagttgttatagaagacggtgcaatgtttgagcttcagaagctttatgtcagggcttgtagagggttagagtacgtaccaagaggaattgagaatcttataaatcttcaagaactgcatttgattcatgtttctaatcagttagtagaacgcattcgcggagaagggagtgtggaccggtcaagggttaaacacattcctgcgattaagcattatttcagaactgataatggctctttctatgtgagcctctcatcttag

SEQ ID NO: 119 - protein, 926 aa, Arabidopsis thaliana
MASATVDFGIGRILSVLENETLLLSGVHGEIDKMKKELLIMKSFLEDTHKHGGNGSTTTTTQLFQTFVANTRDLAYQIEDILDEFGYHIHGYRSCAKIWRAFHFPRYMWARHSIAQKLGMVNVMIQSISDSMKRYYHSENYQAALLPPIDDGDAKWVNNISESSLFFSENSLVGIDAPKGKLIGRLLSPEPQRIVVAVVGMGGSGKTTLSANIFKSQSVRRHFESYAWVTISKSYVIEDVFRTMIKEFYKEADTQIPAELYSLGYRELVEKLVEYLQSKRYIVVLDDVWTTGLWREISIALPDGIYGSRVMMTTRDMNVASFPYGIGSTKHEIELLKEDEAWVLFSNKAFPASLEQCRTQNLEPIARKLVERCQGLPLAIASLGSMMSTKKFESEWKKVYSTLNWELNNNHELKIVRSIMFLSFNDLPYPLKRCFLYCSLFPVNYRMKRKRLIRMWMAQRFVEPIRGVKAEEVADSYLNELVYRNMLQVILWNPFGRPKAFKMHDVIWEIALSVSKLERFCDVYNDDSDGDDAAETMENYGSRHLCIQKEMTPDSIRATNLHSLLVCSSAKHKMELLPSLNLLRALDLEDSSISKLPDCLVTMFNLKYLNLSKTQVKELPKNFHKLVNLETLNTKHSKIEELPLGMWKLKKLRYLITFRRNEGHDSNWNYVLGTRVVPKIWQLKDLQVMDCFNAEDELIKNLGCMTQLTRISLVMVRREHGRDLCDSLNKIKRIRFLSLTSIDEEEPLEIDDLIATASIEKLFLAGKLERVPSWFNTLQNLTYLGLRGSQLQENAILSIQTLPRLVWLSFYNAYMGPRLRFAQGFQNLKILEIVQMKHLTEVVIEDGAMFELQKLYVRACRGLEYVPRGIENLINLQELHLIHVSNQLVERIRGEGSVDRSRVKHIPAIKHYFRTDNGSFYVSLSS

SEQ ID NO: 120 - DNA, 2730 bp, Artificial Sequence
  cDNA
atggatttcatctcatctcttatcgttggctgtgctcaggtgttgtgtgaatctatgaatatggcggagagaagaggacataagactgatcttagacaagccatcactgatcttgaaacagccatcggtgacttgaaggccatacgtgatgacctgactttacggatccaacaagacggtctagagggacgaagctgctcaaatcgtgccagagagtggcttagtgcggtgcaagtaacggagactaaaacagccctacttttagtgaggtttaggcgtcgggaacagaggacgcgaatgaggaggagatacctcagttgtttcggttgtgccgactacaaactgtgcaagaaggtttctgccatattgaagagcattggtgagctgagagaacgctctgaagctatcaaaacagatggcgggtcaattcaagtaacttgtagagagatacccatcaagtccgttgtcggaaataccacgatgatggaacaggttttggaatttctcagtgaagaagaagaaagaggaatcattggtgtttatggacctggtggggttgggaagacaacgttaatgcagagcattaacaacgagctgatcacaaaaggacatcagtatgatgtactgatttgggttcaaatgtccagagaattcggcgagtgtacaattcagcaagccgttggagcacggttgggtttatcttgggacgagaaggagaccggcgaaaacagagctttgaagatatacagagctttgagacagaaacgtttcttgttgttgctagatgatgtctgggaagagatagacttggagaaaactggagttcctcgacctgacagggaaaacaaatgcaaggtgatgttcacgacacggtctatagcattatgcaacaatatgggtgcggaatacaagttgagagtggagtttctggagaagaaacacgcgtgggagctgttctgtagtaaggtatggagaaaagatcttttagagtcatcatcaattcgccggctcgcggagattatagtgagtaaatgtggaggattgccactagcgttgatcactttaggaggagccatggctcatagagagacagaagaagagtggatccatgctagtgaagttctgactagatttccagcagagatgaagggtatgaactatgtatttgcccttttgaaattcagctacgacaacctcgagagtgatctgcttcggtcttgtttcttgtactgcgctttattcccagaagaacattctatagagatcgagcagcttgttgagtactgggtcggcgaagggtttctcaccagctcccatggcgttaacaccatttacaagggatattttctcattggggatctgaaagcggcatgtttgttggaaaccggagatgagaaaacacaggtgaagatgcataatgtggtcagaagctttgcattgtggatggcatctgaacaggggacttataaggagctgatcctagttgagcctagcatgggacatactgaagctcctaaagcagaaaactggcgacaagcgttggtgatctcattgttagataacagaatccagaccttgcctgaaaaactcatatgcccgaaactgacaacactgatgctccaacagaacagctctttgaagaagattccaacagggtttttcatgcatatgcctgttctcagagtcttggacttgtcgttcacaagtatcactgagattccgttgtctatcaagtatttggtggagttgtatcatctgtctatgtcaggaacaaagataagtgtattgccacaggagcttgggaatcttagaaaactgaagcatctggacctacaaagaactcagtttcttcagacgatcccacgagatgccatatgttggctgagcaagctcgaggttctgaacttgtactacagttacgccggttgggaactgcagagctttggagaagatgaagcagaagaactcggattcgctgacttggaatacttggaaaacctaaccacactcggtatcactgttctctcattggagaccctaaaaactctcttcgagttcggtgctttgcataaacatatacagcatctccacgttgaagagtgcaatgaactcctctacttcaatctcccatcactcactaaccatggcaggaacctgagaagacttagcattaaaagttgccatgacttggagtacctggtcacacccgcagattttgaaaatgattggcttccgagtctagaggttctgacgttacacagccttcacaacttaaccagagtgtggggaaattctgtaagccaagattgtctgcggaatatccgttgcataaacatttcacactgcaacaagctgaagaatgtctcatgggttcagaaactcccaaagctagaggtgattgaactgttcgactgcagagagatagaggaattgataagcgaacacgagagtccatccgtcgaagatccaacattgttcccaagcctgaagaccttgagaactagggatctgccagaactaaacagcatcctcccatctcgattttcattccaaaaagttgaaacattagtcatcacaaattgccccagagttaagaaactgccgtttcaggagaggaggacccagatgaacttgccaacagtttattgtgaggagaaatggtggaaagcactggaaaaagatcaaccaaacgaagagctttgttatttaccgcgctttgttccaaattga

SEQ ID NO: 121 - protein, 909 aa, Arabidopsis thaliana
MDFISSLIVGCAQVLCESMNMAERRGHKTDLRQAITDLETAIGDLKAIRDDLTLRIQQDGLEGRSCSNRAREWLSAVQVTETKTALLLVRFRRREQRTRMRRRYLSCFGCADYKLCKKVSAILKSIGELRERSEAIKTDGGSIQVTCREIPIKSVVGNTTMMEQVLEFLSEEEERGIIGVYGPGGVGKTTLMQSINNELITKGHQYDVLIWVQMSREFGECTIQQAVGARLGLSWDEKETGENRALKIYRALRQKRFLLLLDDVWEEIDLEKTGVPRPDRENKCKVMFTTRSIALCNNMGAEYKLRVEFLEKKHAWELFCSKVWRKDLLESSSIRRLAEIIVSKCGGLPLALITLGGAMAHRETEEEWIHASEVLTRFPAEMKGMNYVFALLKFSYDNLESDLLRSCFLYCALFPEEHSIEIEQLVEYWVGEGFLTSSHGVNTIYKGYFLIGDLKAACLLETGDEKTQVKMHNVVRSFALWMASEQGTYKELILVEPSMGHTEAPKAENWRQALVISLLDNRIQTLPEKLICPKLTTLMLQQNSSLKKIPTGFFMHMPVLRVLDLSFTSITEIPLSIKYLVELYHLSMSGTKISVLPQELGNLRKLKHLDLQRTQFLQTIPRDAICWLSKLEVLNLYYSYAGWELQSFGEDEAEELGFADLEYLENLTTLGITVLSLETLKTLFEFGALHKHIQHLHVEECNELLYFNLPSLTNHGRNLRRLSIKSCHDLEYLVTPADFENDWLPSLEVLTLHSLHNLTRVWGNSVSQDCLRNIRCINISHCNKLKNVSWVQKLPKLEVIELFDCREIEELISEHESPSVEDPTLFPSLKTLRTRDLPELNSILPSRFSFQKVETLVITNCPRVKKLPFQERRTQMNLPTVYCEEKWWKALEKDQPNEELCYLPRFVPN

SEQ ID NO: 122 - DNA, 768 bp, Artificial Sequence
  cDNA
atgaaaattgctccagttgccataaatcacagcccgctcagcagggaggtcccgtcacacgcggcaaccactcaggcaaagcaaaccaaccttcaatctgaagctggcgatttagatgcaagaaaaagtagcgcttcaagcccggaaacccgcgcattactcgctactaagacagtactcgggagacacaagatagaggttccagcctttggagggtggttcaaaaagaaatcatctaagcacgagacgggcggttcaagtgccaacgcagatagttcgagcgtggcttccgattccaccgaaaaacctttgttccgtctcacgcacgttccttacgtatcccaaggtaatgagcgaatgggatgttggtatgcctgcgcaagaatggttggccattctgtcgaagctgggcctcgcctagggctgccggagctctatgagggaagggagggcccagctgggctacaagatttttcagatgtagaaaggtttattcacaatgaaggattaactcgggtagaccttccagacaatgagagatttacacacgaagagttgggtgcactgttgtataagcacgggccgattatatttgggtggaaaactccgaatgacagctggcacatgtcggtcctcactggtgtcgataaagagacgtcgtccattacttttcacgatcctcgacaggggccggacctagcaatgccgctcgattactttaatcagcgattggcatggcaggttccacacgcaatgctctaccgctaa

SEQ ID NO: 123 - protein, 255 aa, Pseudomonas syringae
MKIAPVAINHSPLSREVPSHAATTQAKQTNLQSEAGDLDARKSSASSPETRALLATKTVLGRHKIEVPAFGGWFKKKSSKHETGGSSANADSSSVASDSTEKPLFRLTHVPYVSQGNERMGCWYACARMVGHSVEAGPRLGLPELYEGREGPAGLQDFSDVERFIHNEGLTRVDLPDNERFTHEELGALLYKHGPIIFGWKTPNDSWHMSVLTGVDKETSSITFHDPRQGPDLAMPLDYFNQRLAWQVPHAMLYR

SEQ ID NO: 124 - DNA, 2670 bp, Artificial Sequence
  cDNA
atgggaggttgtttctctgtttcattgccatgtgatcaagtagtgagtcagttctctcagttgttatgtgtcaggggaagttatattcacaatctctccaagaatctggcttctctgcagaaggccatgcgaatgctcaaggctcggcaatatgatgtgataagaaggttggaaacagaagagtttacagggcgtcaacaaaggctttcccaagttcaggtatggcttactagtgtcctaatcattcaaaaccagtttaatgatctgcttcgtagtaatgaagttgagcttcaaaggttgtgtctttgtggtttctgctccaaagatttgaaattgagctatcgttatgggaaaagagttatcatgatgttgaaggaagttgagagtctcagttctcaaggattctttgatgtggtttctgaggcaactccgtttgctgatgtggatgagatcccttttcaacccacaattgttggtcaggagataatgcttgaaaaggcatggaaccgtctcatggaagatggatccgggattttgggtctgtacggtatggggggagtaggcaaaacgacactactcacgaagatcaacaataagttttctaaaatagatgacagatttgatgttgtgatatgggttgttgtgtctagaagttcaacagtccgtaagatacaaagagacatagcagaaaaggtaggccttgggggaatggagtggagcgagaaaaacgataaccagatagccgttgacatccacaatgtccttaggagacgaaagtttgttttattgttggatgacatatgggagaaagtgaatttaaaagcggttggagtcccgtatccaagcaaagataacggatgcaaggtagcattcactactcgttctcgagatgtgtgtgggcgcatgggggttgatgatccgatggaagttagctgtctacaacccgaagaatcttgggatttgtttcaaatgaaggttgggaaaaatacactgggaagtcacccagacattcccggacttgctagaaaagtcgctaggaaatgtcgtggcctaccattagcactcaatgttatcggtgaagctatggcatgcaaaagaacagtacatgaatggtgtcatgccattgacgttttaacatcatctgccatagatttttcaggtatggaagatgaaattctccatgttttgaagtatagctatgataatttaaatggggagctgatgaaatcctgcttcctctattgctctctgtttcctgaagactatcttattgataaagaggggttggtagactactggataagtgagggattcataaatgaaaaagaaggcagagagaggaatattaaccaaggttatgagataattggtacccttgtccgtgcatgtttgttgttggaggaagaaaggaacaaatcaaacgtgaaaatgcatgatgtggttcgtgagatggctctatggatatcatccgatcttgggaagcaaaaggagaaatgtattgtgcgagctggtgttgggttacgtgaagtaccaaaagtcaaggattggaacactgtgagaaagatttctttgatgaataatgagattgaagagatatttgacagtcacgagtgtgctgcacttacaactctatttctccaaaagaacgacgtggtaaagatctcggctgaattctttcgatgtatgcctcatctggtggttttagatctatcagagaatcagagtcttaatgaattaccagaagaaatatcagagctggcctctttgagatatttcaacttgtcatatacatgtatacatcaactacccgttggtttatggacattgaaaaagctaatacatctgaatctcgaacacatgagcagtcttgggagtatattagggatatcaaatttgtggaatttgaggacattgggactacgagattccagactgttgctagatatgagtttagtgaaggagctgcagctcttagaacatctagaagttataaccctagatatatcatcaagtttggttgcagagccattgttatgctctcaaaggttggtggaatgtataaaagaggtagattttaagtaccttaaggaagaatcagtgagagtattgactttgccaaccatgggtaatctccgcaagctcgggataaaaagatgtggaatgagggagataaagatagagaggacaacttcatcatcgtctcggaacaaaagtcccacaactccatgcttctcaaacctctccagagtctttatagctaaatgccatggtcttaaggatttgacgtggcttttgtttgctcctaatcttacttttcttgaagttgggttctcaaaggaagtagaggatataattagtgaagagaaagctgaggagcattcagctacgattgttccttttaggaaattggagacactacacctgtttgaattacgcgggctcaagagaatctatgcaaaggctctgcattttccgtgtctgaaagttatccacgtagaaaaatgtgaaaagctgagaaagcttccattggattctaaaagtgggatcgcgggtgaagaacttgtcatatattatggagagagagaatggatagaaagggttgaatgggaggaccaagcaactcaactccgtttcttaccttcatccaggtggcggtggagagaaacataa

SEQ ID NO: 125 - protein, 889 aa, Arabidopsis thaliana
MGGCFSVSLPCDQVVSQFSQLLCVRGSYIHNLSKNLASLQKAMRMLKARQYDVIRRLETEEFTGRQQRLSQVQVWLTSVLIIQNQFNDLLRSNEVELQRLCLCGFCSKDLKLSYRYGKRVIMMLKEVESLSSQGFFDVVSEATPFADVDEIPFQPTIVGQEIMLEKAWNRLMEDGSGILGLYGMGGVGKTTLLTKINNKFSKIDDRFDVVIWVVVSRSSTVRKIQRDIAEKVGLGGMEWSEKNDNQIAVDIHNVLRRRKFVLLLDDIWEKVNLKAVGVPYPSKDNGCKVAFTTRSRDVCGRMGVDDPMEVSCLQPEESWDLFQMKVGKNTLGSHPDIPGLARKVARKCRGLPLALNVIGEAMACKRTVHEWCHAIDVLTSSAIDFSGMEDEILHVLKYSYDNLNGELMKSCFLYCSLFPEDYLIDKEGLVDYWISEGFINEKEGRERNINQGYEIIGTLVRACLLLEEERNKSNVKMHDVVREMALWISSDLGKQKEKCIVRAGVGLREVPKVKDWNTVRKISLMNNEIEEIFDSHECAALTTLFLQKNDVVKISAEFFRCMPHLVVLDLSENQSLNELPEEISELASLRYFNLSYTCIHQLPVGLWTLKKLIHLNLEHMSSLGSILGISNLWNLRTLGLRDSRLLLDMSLVKELQLLEHLEVITLDISSSLVAEPLLCSQRLVECIKEVDFKYLKEESVRVLTLPTMGNLRKLGIKRCGMREIKIERTTSSSSRNKSPTTPCFSNLSRVFIAKCHGLKDLTWLLFAPNLTFLEVGFSKEVEDIISEEKAEEHSATIVPFRKLETLHLFELRGLKRIYAKALHFPCLKVIHVEKCEKLRKLPLDSKSGIAGEELVIYYGEREWIERVEWEDQATQLRFLPSSRWRWRET

SEQ ID NO: 126 - DNA, 804 bp, Artificial Sequence
  cDNA
atgaaaataggtacgcaggccacctcgctggccgttttgcacaatcaggagtcgcatgctccacaggcaccaattgctgtaagacctgagcctgctcacgcaatcccagaaattcctttagacctcgccattaggcctagaacacgtggcatacacccattcctggcaatgacactgggcgataaagggtgtgcatcctcttcaggcgtaagtctagaagatgattctcacacgcaagtaagcttgagtgatttttctgtggcttcaagagatgttaatcataacaatatttgtgccggcctctccacggagtggcttgtaatgagtagtgacggagatgcagaatcacgcatggaccatctcgactataacggagagggacaaagcaggggaagcgaaaggcatcaggtttataatgatgcgttacgtgccgcactatcaaatgatgatgaagcaccttttttcacagccagtaccgctgttatcgaagatgctggtttctctctacgcagggaaccaaaaactgttcatgcgtcaggtggcagtgcgcaattgggccagacagtagcccatgatgtagctcaatctggtagaaaacatttgctgagcttacgttttgcaaacgttcaaggacacgcaatcgcgtgctcctgtgagggaagtcagttcaagctgtttgaccctaacctcggtgagtttcaatcatcccgcagcgcagcaccgcagctcattaagggcttaatagatcactataatagcttaaactacgacgtagcttgcgtaaacgagtttagagtttcgtaa

SEQ ID NO: 127 - protein, 267 aa, Pseudomonas syringae
MKIGTQATSLAVLHNQESHAPQAPIAVRPEPAHAIPEIPLDLAIRPRTRGIHPFLAMTLGDKGCASSSGVSLEDDSHTQVSLSDFSVASRDVNHNNICAGLSTEWLVMSSDGDAESRMDHLDYNGEGQSRGSERHQVYNDALRAALSNDDEAPFFTASTAVIEDAGFSLRREPKTVHASGGSAQLGQTVAHDVAQSGRKHLLSLRFANVQGHAIACSCEGSQFKLFDPNLGEFQSSRSAAPQLIKGLIDHYNSLNYDVACVNEFRVS

SEQ ID NO: 128 - DNA, 2718 bp, Artificial Sequence
  cDNA
atggctcatgcaagtgtggcttctcttatgagaacaatagaatctctcttgacattcaattcgccgatgcaatctctatcctgtgatcacagagaagaactttgcgctcttcgtgaaaaagttagttccctggaagtatttgtcaagaactttgagaaaaacaatgtttttggggaaatgacggattttgaagtagaggtaagagaagttgcaagtgctgctgaatacacaattcaactgagactaacaggaactgtactgggagaaaataaaagccagaaaaaaaaggcgcgtcgaaggtttcgtcaaagcctgcaacaagtagcagaggacatggatcatatctggaaagagtcgacaaagatccaagataaaggaaaacaagtatcaaaggaatcattggttcatgatttttcaagttcaacaaacgatattttgaaggttaagaacaatatggttggacgtgatgatcaaaggaaacagttgttagaagatctgactagaagctactctggggaacccaaagtcatcccgattgtcgggatgggaggcataggtaaaacaaccttagcaaaagaagtttacaatgatgaatcaattctatgccgttttgatgttcatgcctgggctaccatatctcaacagcacaacaaaaaggaaattttgctgggccttctgcattccacaatcaaaatggatgacagggttaagatgattggtgaagcagagctagcagacatgttacagaaaagtttaaagagaaagaggtacttaattgtcttggatgatatctggagttgtgaagtgtgggatggcgtgagacgatgctttccaactgaagacaatgcagggagtcgaatactgttgactacccgtaatgatgaagtagcttgttatgctggtgtagagaatttttctttgcggatgagcttcatggatcaagatgagagttggagtcttttcaaaagtgcagcattttcaagtgaagcattaccatatgagttcgagactgttggaaagcaaatcgcagatgaatgtcacgggttaccactaactattgtcgtggttgcagggcttctcaaatctaaaaggacaatagaagattggaaaactgttgctaaagatgtcaagtcattcgtcacaaatgatcctgatgaacgatgttcacgtgtgcttgggttgagttacgatcacttgacaagcgatctaaaaacatgtcttctgcatttcggaatttttccagaagacagtgatattccagtgaagaatttgatgagatcatggatggctgaggggttcctgaagttggaaaatgatttggaaggagaggttgagaagtgtttgcaagagcttgtcgatagatgtctagtcctcgtcagcaagagaagtcgagatggaacaaaaattagatcatgtaaggttcatgatctaatatatgacctgtgcgtgagagaagttcaaagggagaacatttttatcatgaacgacattgttcttgacgtatcatatccagaatgttcatatctctgtatgtataaaatgcagccctttaagcgcgtgactggtgatgaaattaattattgtccctatggtctttatagggctcttcttacccctgtaaatcgtcagttgagagatcatgacaacaacaatcttttgaaacgaacccattctgttttctcttttcatcttgagcctttatattatgttctcaaatcagaggttgttcatttcaaattactcaaagtcttggagctgagacacagacagattgatggtttccctcgagagatactaagcctcatctggttgaggtacctatcattgttcagctatgggaatttcgatgtacctccagaaatttgcaggttatggaatctgcagacattcattgttcaacggtttcgatcagatataataatttttgctgaggaaatttgggaactaatgcaattaaggcatcttaaactgcccagattttatttgccagattgcccaagtggatctgttgacaaaggaaggcacttggatttttcaaacttacaaactatttcttacttgtctccacgttgttgcacgaaggaggttattatggggattcagaatgtcaaaaaattaggaatcagtggaaataaggatgactataaaagttttcgggactctgggcttcccaacaatcttgtctatctgcagcaacttgaaatattgagtcttatatctgttgattatagccttttgccagtgatcatttcaagtgcaaaagcttttccagcaacgctcaagaagttgaagttggaaagaacttatctaagctggtcatacttggacatcatagctgagttgcctaaccttgaggtgctgaagctgatggatgacgcttgttgtggtgaagaatggcatccaattgttatgggatttaatcgattgaagcttttgctaattaaatatagttttctcaagttctggaaagccacaaatgacaattttcctgtccttgagcgcctcatgattagaagttgcaaaaatttgaaagagatacccattgagtttgcagatatacacacactacagctgattgagttaagagagtgtcctcccaaacttggggaatctgctgcacgaattcagaaagaacaagaagacctcggaaacaaccctgtggatgttcgtatctcaaatccattgaaggagagtgattctgattcagaagaacattag

SEQ ID NO: 129 - protein, 905 aa, Capsicum chacoense
MAHASVASLMRTIESLLTFNSPMQSLSCDHREELCALREKVSSLEVFVKNFEKNNVFGEMTDFEVEVREVASAAEYTIQLRLTGTVLGENKSQKKKARRRFRQSLQQVAEDMDHIWKESTKIQDKGKQVSKESLVHDFSSSTNDILKVKNNMVGRDDQRKQLLEDLTRSYSGEPKVIPIVGMGGIGKTTLAKEVYNDESILCRFDVHAWATISQQHNKKEILLGLLHSTIKMDDRVKMIGEAELADMLQKSLKRKRYLIVLDDIWSCEVWDGVRRCFPTEDNAGSRILLTTRNDEVACYAGVENFSLRMSFMDQDESWSLFKSAAFSSEALPYEFETVGKQIADECHGLPLTIVVVAGLLKSKRTIEDWKTVAKDVKSFVTNDPDERCSRVLGLSYDHLTSDLKTCLLHFGIFPEDSDIPVKNLMRSWMAEGFLKLENDLEGEVEKCLQELVDRCLVLVSKRSRDGTKIRSCKVHDLIYDLCVREVQRENIFIMNDIVLDVSYPECSYLCMYKMQPFKRVTGDEINYCPYGLYRALLTPVNRQLRDHDNNNLLKRTHSVFSFHLEPLYYVLKSEVVHFKLLKVLELRHRQIDGFPREILSLIWLRYLSLFSYGNFDVPPEICRLWNLQTFIVQRFRSDIIIFAEEIWELMQLRHLKLPRFYLPDCPSGSVDKGRHLDFSNLQTISYLSPRCCTKEVIMGIQNVKKLGISGNKDDYKSFRDSGLPNNLVYLQQLEILSLISVDYSLLPVIISSAKAFPATLKKLKLERTYLSWSYLDIIAELPNLEVLKLMDDACCGEEWHPIVMGFNRLKLLLIKYSFLKFWKATNDNFPVLERLMIRSCKNLKEIPIEFADIHTLQLIELRECPPKLGESAARIQKEQEDLGNNPVDVRISNPLKESDSDSEEH

SEQ ID NO: 130 - DNA, 2145 bp, Artificial Sequence
  cDNA
atgcgtatcggtcctctgcaaccttctatcgcgcacactgccgcgccggcactaccgacgcacaccagtgcgatcagcccgacgcaggtgccgcacatgccgggcaacaccccgccactgcgagaaaggccgcgtcgccgcgccggcaatatgcctccgctggtgccgttgaacgacagcgcgatgaccggcaagccggccctggtggcgctcgacagcgaattctccgagcagcgtctggccgaagtgcaggcgcgccagatcaccgtgcagaccctgcaaggcaagcttgccacgcatcttgcgcaggccggcacggcgctcaaacccgacagcattgcggcacgctttgctgccggcacactggagccggtgtatctggataccgccgccttcaatgccatgtcgcgcgggctgcccgcacgcgcacgtgcggccgcaggcccggtgctgatcgatgcacaacaaggtcgcatcatcttcaatctgcagcgcgcgtttgcgcctggcgacaccttcagcgacgcggcgcttgccgcgcttggcaagcagttgaatctttccggccacgggctggcaacgccgaactggctgcagcctgccgcaggcacgccggggcggcgcaagctgcagcaagccgcgcgctatcacggccacgaggtgccggcccgcgacggtggcgccgggttcttcaaggccaacgaccatcgcctgctggaaggcaagcaagtgctgttgcgcaatcatcaaaagtcgctcgtgcacaaccactacttcgaagcacccagcacgcgtgcgttcggaaaggacgtcatggtgcatcgcgggctgttcgataatcacgccggcattccggaaaactcgctggcgtccatcgatcatgcctacgagcagggctaccgcaatctggagctggacgtcgaagtcagttccgatggcgtgccggtgttgatgcacgatttcagcatcggccgcatggcaggcgacccgcagaaccggttggtgtcgcaggtgccgtttgccgagctgcgtgaaatgccgttggtgattcgcaacccgtctgacggaaactacgtcaagaccgaccagaccatcgccggtgtggagcagatgctggagcacgtgctcaaaaagcccgagccgatgtcggtggcgctggactgcaaggaaaacaccggcgaagcagtggcgatgctgctgatgcgccggccggacctgcgcaaggctgcggcgatcaaggtctatgccaagtactacacgggcggctttgaccaattcctgtccaatttgtacaagcactaccagatcaacccgttgcactcgcaggatgcgccgcgccgcgccgcgctggatcgcttgctggccaagatcaacgtggtgccggtcttgagccagggcatgttgaacgacgagcgcttgcgcggcttctttcgaagcaatgagcagggcgccgcggggctcgcagacaccgcaatgcagtggctggacagctggaccaagatgcgcccggtgatcgtggaggcggtggccaccgacgacagcgatgccggcaaggccatggaaatggctcggacgcggatgcgccagccggactcggcctacgcgaaggccgcgtattcggtgagctaccggtatgaggacttttccgtgccgcgcgccaatcacgacaaggactactacgtttaccgcaacttcggtgaactgcaaaagctcaccaacgaggccttcggcgtcaagcgcaccacggccggcgcgtttcgcgacgatggcgaaagcctgttgaccgatcagcccgaggccgaattgctcgccatcctggaaaaccgcgcgctggcccggggccataccggcaatgaactcgacgtgccgccggaaacgcccatcgatatcaaccgggatgccgagatcgtgaagcagcgaacccagcaatttcaggccagctccatccccgctgacccgaaccacatctccgcggttcgcgaaggcaagcaacacgatcacaccgcagacatggtcaatgaccctgcggcaacgcgtgcgctggacaagcgcgccaaagcgcttggtttgctgaccgacaaataccgtggcgcgcctgtgacccactatctcaatgagcaggccaggcagacggagacggattga

SEQ ID NO: 131 - protein, 714 aa, Xanthomonas campestris
MRIGPLQPSIAHTAAPALPTHTSAISPTQVPHMPGNTPPLRERPRRRAGNMPPLVPLNDSAMTGKPALVALDSEFSEQRLAEVQARQITVQTLQGKLATHLAQAGTALKPDSIAARFAAGTLEPVYLDTAAFNAMSRGLPARARAAAGPVLIDAQQGRIIFNLQRAFAPGDTFSDAALAALGKQLNLSGHGLATPNWLQPAAGTPGRRKLQQAARYHGHEVPARDGGAGFFKANDHRLLEGKQVLLRNHQKSLVHNHYFEAPSTRAFGKDVMVHRGLFDNHAGIPENSLASIDHAYEQGYRNLELDVEVSSDGVPVLMHDFSIGRMAGDPQNRLVSQVPFAELREMPLVIRNPSDGNYVKTDQTIAGVEQMLEHVLKKPEPMSVALDCKENTGEAVAMLLMRRPDLRKAAAIKVYAKYYTGGFDQFLSNLYKHYQINPLHSQDAPRRAALDRLLAKINVVPVLSQGMLNDERLRGFFRSNEQGAAGLADTAMQWLDSWTKMRPVIVEAVATDDSDAGKAMEMARTRMRQPDSAYAKAAYSVSYRYEDFSVPRANHDKDYYVYRNFGELQKLTNEAFGVKRTTAGAFRDDGESLLTDQPEAELLAILENRALARGHTGNELDVPPETPIDINRDAEIVKQRTQQFQASSIPADPNHISAVREGKQHDHTADMVNDPAATRALDKRAKALGLLTDKYRGAPVTHYLNEQARQTETD

SEQ ID NO: 132 - DNA, 2718 bp, Artificial Sequence
  cDNA
atggcagagattgctgttcttctcgtcctgaagaagattgccatagctctggcaggagagaccctaagttttgctaaaccattgcttgcaaagaagtctgagtcggtggcagcactcccagatgacatgaaactgattagtaatgagctcgagcttatccgggcgtttctcaaggaaatcggcaggaaaggctggaaaagcgaagtgatagaaacatggatagggcaggtccgaagactggcttatgatatggaagacactgtagaccattttatttacgttgttggtacacacgatcagatgggatcatgctgggattacatgaagaagatagccaagaagcctcggcgtctggtttcactagatgaaattgctagtgagattaagaagataaagcaagagcttaaacaactctcggaaagtagagaccgctggactaaacccttggatggcgggagtggtatacctgcaggaagctatgaaactgaaaaggaaatgtatcttcctggacatgattacacaatcagcgacgaggagcttgcaggaattgatgaaaataagcaaaccttgattagttcattaaaatttgaagatccatcacttcggatcattgctgtctggggtatgggtggcgttggaaaaagcactcttgtaaataatgtgtacaaaaatgaaggatccaactttgactgccgtgcatgggtttctatctctcagtcatatagactagaagatatatggaagaaaatgctgacagatctcatcgggaaagataagatagaatttgatcttggaacaatggatagtgcagaactaagagagcaattgacaaaaactctagacaaaaggcagtacctgatcatactggatgatgtctggatggctaatgttttttttaaaattaaagaagttcttgtagataatggccttggaagcagagtaataatcacaacaagaattgaggaggtagcttcactagctaagggtagttgtaagatcaaagtagaacctctgggtgtcgatgattcctggcatgtattttgtaggaaggcatttctgaaagatgaaaaccatatctgccctccagagttgcgtcagtgtggtataaacattgtggagaaatgtgatggtttgccattagcccttgtggcaataggaagcatattgtcgctgagaccgaagaatgttgacgagtggaagctattttatgaccagcttatctgggagctacacaacaatgagaaccttaatcgcgtggagaaaattatgaatctaagttataaatacttaccagactatttgaagaactgcttcctgtattgtgctatgtttccagaagactatctaatacacagaaagagattgattagattgtggatagctgaaggatttattgaacaaaaaggggcatgcagcttagaagacactgctgaaagttatcttaaagaacttatacgacggagcatgcttcacgttgcagagaggaactgctttggtaggattaaatgtattcgaatgcatgatcttgtgcgtgaacttgccattttccaatctaaaagagagggtttcagtacaacttatggtggaaataatgaagcagtgctagtgggatcatattctcgacgagtggctgtgctccaatgcagcaagggcattccatcaaccattgatccatccaggcttcgcaccttaattacattcgacaccagcagagcattatctgtgtggtattcttctatttcctccaaaccaaagtaccttgcagtattagacttatcaagcttgcctattgagactattccaaattcaattggagagcttttcaaccttaggcttttatgcctcaataaaaccaaagtgaaagagctccctaaatctattacaaaacttcaaaacctacagacaatgagtcttgagaatggggagttagtgaagttcccacaagggttttcaaaactgaagaaattgcgacatcttatggtttcacggttgcaagatgtaactttcagcggtttcaaaagttgggaagctgtggagccatttaagggcttgtggactttgattgaactgcaaactctgtatgccattacagcaagtgaagtattagttgcaaaacttggaaatttatcccagctgaggcggcttataatttgtgatgtaaggagtaacttatgtgcacagttgtgtggctctttgtcaaagttgtgccagctgtcacgattaacgataagagcatgcaatgaagatgaagtgctacagctggatcatttgacatttccaaatcctcttcaaacccttagtttagatggacgactgtcagaaggaactttcaaatctccctttttcttaaatcatggaaatgggcttcttaggctaatgttgttttacagtcagctttcagaaaatccagtaccacacctctctgaattgtcaaacttgactaggttatcccttataaaggcatacaccggccaagaattatacttccaagcaggttggttcctgaatttaaaagaactttacttgaagaatttgtcccggctcaatcaaatagacatacaggagggagctttggccagccttgaacgtataacaatgaaacacctcccggagctacgggaggttccagtcggtttcagatttctcaagtccctaaaaacaatatttttttccgatatgcatcctgagtttgaaagcagctttcaaaaggaaatgtag

SEQ ID NO: 133 - protein, 905 aa, Zea mays
MAEIAVLLVLKKIAIALAGETLSFAKPLLAKKSESVAALPDDMKLISNELELIRAFLKEIGRKGWKSEVIETWIGQVRRLAYDMEDTVDHFIYVVGTHDQMGSCWDYMKKIAKKPRRLVSLDEIASEIKKIKQELKQLSESRDRWTKPLDGGSGIPAGSYETEKEMYLPGHDYTISDEELAGIDENKQTLISSLKFEDPSLRIIAVWGMGGVGKSTLVNNVYKNEGSNFDCRAWVSISQSYRLEDIWKKMLTDLIGKDKIEFDLGTMDSAELREQLTKTLDKRQYLIILDDVWMANVFFKIKEVLVDNGLGSRVIITTRIEEVASLAKGSCKIKVEPLGVDDSWHVFCRKAFLKDENHICPPELRQCGINIVEKCDGLPLALVAIGSILSLRPKNVDEWKLFYDQLIWELHNNENLNRVEKIMNLSYKYLPDYLKNCFLYCAMFPEDYLIHRKRLIRLWIAEGFIEQKGACSLEDTAESYLKELIRRSMLHVAERNCFGRIKCIRMHDLVRELAIFQSKREGFSTTYGGNNEAVLVGSYSRRVAVLQCSKGIPSTIDPSRLRTLITFDTSRALSVWYSSISSKPKYLAVLDLSSLPIETIPNSIGELFNLRLLCLNKTKVKELPKSITKLQNLQTMSLENGELVKFPQGFSKLKKLRHLMVSRLQDVTFSGFKSWEAVEPFKGLWTLIELQTLYAITASEVLVAKLGNLSQLRRLIICDVRSNLCAQLCGSLSKLCQLSRLTIRACNEDEVLQLDHLTFPNPLQTLSLDGRLSEGTFKSPFFLNHGNGLLRLMLFYSQLSENPVPHLSELSNLTRLSLIKAYTGQELYFQAGWFLNLKELYLKNLSRLNQIDIQEGALASLERITMKHLPELREVPVGFRFLKSLKTIFFSDMHPEFESSFQKEM

SEQ ID NO: 134 - DNA, 1266 bp, Artificial Sequence
  cDNA
atgaaaaacaagacagacattgctggcatagccggactttctacgtctcatgtttcctttgatgacgcagaatccaaaagcgtcctagatggatcaacacagtctacgccggagtacaaattccagaccccgcttgatcagttgccggctaggcccgctggtccgaagagcagtaacacaactgatgcttacattcatgaatcactgccgcattcggttccaatcgcaggtgcatcgacctccgcggtgacacatcaacaggctactcagcgtaaaggcaccgatgagatctatggtttgggcagcctcccatctgctggtccagggcgatgggagtatcttgcgaatccggggaactggcatcccgagcgccgtaagttacacgaaaagctattagatcaagcgcgatcttctgccttgaccctggcagaatcccttgagagtgatggctgccaaccgacattgtttgcgctgcgcggaaataccgcaacgggtaaaacacggattgcgacaaaaaagatcccggtgctcgcagcagctctgaagaagacagctgggaaaggttgcgtgaatccagatgtattcaagagttcgcttgcgaaatccgagacaggcgccaagatatttagttcggcacaagtgcatagcgagtcatcttttcttgccgaccggtttgaaggcggacttcgctctcaaaagacgggcagcggtgcaatcgctagcattgttgtcgacaagcgcttgtcaagagagtacgaaattgatagctacatacaactagcgaaagaaaccggtagaaaagtggaattgtgcgatatcgacgcgcccctagagaattctttggtgggagttttgcagcgaaaaccggaaggtgaagatcctaggcctccgtaccctgtagtctcgagtggatttgtagccgtacggagcaatagaatgtacgtgatagacaggttcattgccgatccgagcctgggaaactaccgactattcggaacagctgaagatggtgagaaggtcatggttgctagcgtgattggcggtgagtttagtgtagagaatgctgagttgtatgaaaaaatcacgtccccacagctctcggttacgggcgatttggctgataaggtaatcgacaaggaattgattgatcgtctggaaaataatatagctgaccccgagcgggcggccaagacgcgagccgccctggaaaaatacagcggtaagtcatggtcggccgcgctagctgctcacagcgagctaatttga

SEQ ID NO: 135 - protein, 421 aa, Xanthomonas oryzae
MKNKTDIAGIAGLSTSHVSFDDAESKSVLDGSTQSTPEYKFQTPLDQLPARPAGPKSSNTTDAYIHESLPHSVPIAGASTSAVTHQQATQRKGTDEIYGLGSLPSAGPGRWEYLANPGNWHPERRKLHEKLLDQARSSALTLAESLESDGCQPTLFALRGNTATGKTRIATKKIPVLAAALKKTAGKGCVNPDVFKSSLAKSETGAKIFSSAQVHSESSFLADRFEGGLRSQKTGSGAIASIVVDKRLSREYEIDSYIQLAKETGRKVELCDIDAPLENSLVGVLQRKPEGEDPRPPYPVVSSGFVAVRSNRMYVIDRFIADPSLGNYRLFGTAEDGEKVMVASVIGGEFSVENAELYEKITSPQLSVTGDLADKVIDKELIDRLENNIADPERAAKTRAALEKYSGKSWSAALAAHSELI

SEQ ID NO: 136 - DNA, 3801 bp, Artificial Sequence
  cDNA
atggagattggcttagcagttggtggtgcatttctctcctcagctttgaatgttctgtttgataggcttgctcctaacggtgatctgctcaacatgtttcggaagcataaggatcatgttaagctcttaaagaagctgaaaatgactttgcgtggtattcagattgtgctaagtgatgcagagaataagcaagcatcaaatccatctgtgagagactggcttaatgagcttcgagatgctgtcgactctgctgaaaatttaatagaagaagtcaattatgaagctttgaggcttaaggtggaaggtcagcatcagaatttttcagaaacaagcaaccagcaagtaagtgatgattttttccttaacataaaggacaagctggaagacactattgaaacattaaaggatttgcaagagcaaattggtctccttggcttaaaggagtattttgattccacgaaactagaaactagaagaccttcaacttctgtggatgatgaatctgatatctttggtaggcagagcgaaatagaggatttgattgaccgtctattgtctgaaggtgcaagtgggaaaaagctgacagtagttcctatcgttggaatgggcggccagggcaagacaacacttgctaaagccgtatacaatgatgagagggtgaagaatcattttgatttgaaagcgtggtattgcgtttctgaaggatttgatgctttgagaataacaaaagaattactccaagaaattggcaaatttgactcgaaggatgtccacaacaatcttaaccagcttcaagtcaaattgaaggaaagtttgaagggaaagaagttccttattgttttggatgatgtgtggaatgaaaattacaacgagtggaatgacttgagaaatatttttgcacaaggagatataggaagtaagatcattgtgacgacacgcaaagacagtgttgccttgatgatgggaaatgagcaaattcgcatgggcaatttgtctaccgaagcctcttggtctttatttcaaagacatgcatttgaaaacatggatcctatgggacatccggaacttgaagaggtcggaagacaaattgcagccaagtgcaaaggactgcccttagctctgaagacgctcgctggcatgttacgctccaaatcagaggttgaagagtggaaacgtattttgagaagtgaaatatgggagctgccacacaatgacatattaccagcgttgatgttgagctacaatgatcttcccgcacatttaaagcgatgcttttctttttgtgcaatatttcctaaagattatccatttaggaaagaacaagttattcatctatggattgccaatggtctcgtaccagtgaaagatgaaataaatcaagatttaggcaaccaatactttctagagttgagatcaagatcattatttgaaaaggtcccaaatccttctaaaaggaacatagaggaattattccttatgcatgaccttgtcaatgatttagcccaacttgcatcttcaaaactttgtatcaggttagaagagagccaaggatctcatatgttggaacaatgtcggcacttatcttattcaataggatttaatggtgagtttaagaaattgacacccctctacaaattggagcagttgaggacattgcttccgatacgtattgaattcagattgcacaatctaagcaagagggtgttgcataacatactgcctacactaagatccttgagggccctatcattctctcaatacaagattaaggagttgccaaatgacttgtttaccaaattaaagctcctcagatttttggatatttctcggacatggattacaaagttgccggattccatttgtggattatataacttggagacacttctcctgtcatcttgtgctgatcttgaggagctaccgctgcagatggagaagttgattaacttgcgtcatcttgacgtaagcaacactcggcgcttgaagatgccactacatctgagcaggttgaaaagcctccaagtgttggtgggacccaagttttttgtagatggttggagaatggaagatttgggtgaagcacaaaacttacatggatctctatcagttgtgaagttggaaaatgtggttgatagaagggaagctgtgaaggcaaagatgagggagaagaatcatgttgagcaattatcattggagtggagtgaaagtagtattgccgacaattcacaaacagaaagtgacatacttgatgagctatgcccacataaaaacatcaaaaaagtcgaaatcagtggatatagagggacaaactttcccaattgggtagctgatcctttgtttcttaagctggtgaatttgtctctaagaaactgcaaggactgttactccttgccagcactaggacaactcccttgtttgaaattcctttccgttaaagggatgcatggaataagagtggtgacggaagaattctatggcagattgtcctccaaaaagccttttaactctctagagaagcttgaatttgaagatatgacggagtggaagcaatggcacgcactaggaattggagagttccctacacttgagaacctttcaattaaaaattgccctgagctcagtttggagatacccatccaattttcaagtttaaaaaggttagaagttagtgattgtccagttgtttttgatgatgcccaactgtttagatcccaacttgaggcaatgaagcagattgaggaaatagatatatgtgattgtaactctgttacctcctttccttttagcatactgccaactaccttgaagagaatacagatatctcgttgcccaaaattgaaattggaggcgccagttggtgagatgtttgtggagtatttgagagtgaatgattgtggttgtgtagatgatatatcacctgagtttctcccaacagcacgtcaattgagtattgaaaattgccagaacgttactaggtttttgattcctactgccactgaaactctccgtatttcgaattgtgagaatgttgaaaaactatcggtggcatgtggaggagcggcccagatgacgtcactgaatatttggggatgtaagaagctcaagtgtcttccagaactccttccatctctcaaggaactgcgtctgtctgattgtccagaaatagaaggagaattgcccttcaatttagaaatactccgtatcatatattgcaagaaactggtgaatggccgaaaggagtggcatttacagagactcacagagttatggatcgatcatgatgggagtgacgaagatattgaacattgggagttgccttgttctattcagagacttaccataaagaatcttaaaacattaagcagccaacatctcaaaagcctcacctctcttcaatatctatgtattgagggttatttatctcagattcagtcacaaggccagctttcctccttttctcacctcacttcgcttcaaactctacaaatctggaatttccttaatctccaatcacttgctgaatcagcactgccctcctccctctctcacctggagatagatgattgccctaatctccaatcactcttcgaatcagcactgccctcctccctctctcagctgttcatccaggattgccctaatctccaatcccttccatttaaagggatgccctcttccctctctaaactatctattttcaattgcccattgctcacaccactactagaatttgacaagggggaatactggccacaaattgctcatattcccatcataaatatcgattggaaatatatttaa

SEQ ID NO: 137 - protein, 1266 aa, Solanum lycopersicum
MEIGLAVGGAFLSSALNVLFDRLAPNGDLLNMFRKHKDHVKLLKKLKMTLRGIQIVLSDAENKQASNPSVRDWLNELRDAVDSAENLIEEVNYEALRLKVEGQHQNFSETSNQQVSDDFFLNIKDKLEDTIETLKDLQEQIGLLGLKEYFDSTKLETRRPSTSVDDESDIFGRQSEIEDLIDRLLSEGASGKKLTVVPIVGMGGQGKTTLAKAVYNDERVKNHFDLKAWYCVSEGFDALRITKELLQEIGKFDSKDVHNNLNQLQVKLKESLKGKKFLIVLDDVWNENYNEWNDLRNIFAQGDIGSKIIVTTRKDSVALMMGNEQIRMGNLSTEASWSLFQRHAFENMDPMGHPELEEVGRQIAAKCKGLPLALKTLAGMLRSKSEVEEWKRILRSEIWELPHNDILPALMLSYNDLPAHLKRCFSFCAIFPKDYPFRKEQVIHLWIANGLVPVKDEINQDLGNQYFLELRSRSLFEKVPNPSKRNIEELFLMHDLVNDLAQLASSKLCIRLEESQGSHMLEQCRHLSYSIGFNGEFKKLTPLYKLEQLRTLLPIRIEFRLHNLSKRVLHNILPTLRSLRALSFSQYKIKELPNDLFTKLKLLRFLDISRTWITKLPDSICGLYNLETLLLSSCADLEELPLQMEKLINLRHLDVSNTRRLKMPLHLSRLKSLQVLVGPKFFVDGWRMEDLGEAQNLHGSLSVVKLENVVDRREAVKAKMREKNHVEQLSLEWSESSIADNSQTESDILDELCPHKNIKKVEISGYRGTNFPNWVADPLFLKLVNLSLRNCKDCYSLPALGQLPCLKFLSVKGMHGIRVVTEEFYGRLSSKKPFNSLEKLEFEDMTEWKQWHALGIGEFPTLENLSIKNCPELSLEIPIQFSSLKRLEVSDCPVVFDDAQLFRSQLEAMKQIEEIDICDCNSVTSFPFSILPTTLKRIQISRCPKLKLEAPVGEMFVEYLRVNDCGCVDDISPEFLPTARQLSIENCQNVTRFLIPTATETLRISNCENVEKLSVACGGAAQMTSLNIWGCKKLKCLPELLPSLKELRLSDCPEIEGELPFNLEILRIIYCKKLVNGRKEWHLQRLTELWIDHDGSDEDIEHWELPCSIQRLTIKNLKTLSSQHLKSLTSLQYLCIEGYLSQIQSQGQLSSFSHLTSLQTLQIWNFLNLQSLAESALPSSLSHLEIDDCPNLQSLFESALPSSLSQLFIQDCPNLQSLPFKGMPSSLSKLSIFNCPLLTPLLEFDKGEYWPQIAHIPIINIDWKYI

SEQ ID NO: 138 - DNA, 492 bp, Artificial Sequence
  cDNA
atgcgtttccttctgcttatagccatgtccatgacatgggtttgctctattgctgggctacctgtggaagatgccgattcatctgtcggtcagctccaaggacggggtaacccatattgcgtgtttcccggccgccgcacgtcttctacttcatttactacgagcttcagcaccgaacctctgggttatgctagaatgttacacagagaccctccatatgagcgggctggcaattcgggactgaatcaccgcatttacgaacgaagtcgcgttggaggcctccgcactgtcattgatgtcgcccccccggacggacaccaagccatcgccaactacgagatcgaagtccgtcgtattcctgttgcaacacctaatgcggctggagattgctttcacactgcacgccttagtaccggctctcgaggtccagccacaatcagttgggatgccgacgctagttatacctactatcttactatctcagaggattga

SEQ ID NO: 139 - protein, 163 aa, Fusarium oxysporum
MRFLLLIAMSMTWVCSIAGLPVEDADSSVGQLQGRGNPYCVFPGRRTSSTSFTTSFSTEPLGYARMLHRDPPYERAGNSGLNHRIYERSRVGGLRTVIDVAPPDGHQAIANYEIEVRRIPVATPNAAGDCFHTARLSTGSRGPATISWDADASYTYYLTISED

SEQ ID NO: 140 - DNA, 357 bp, Artificial Sequence
  cDNA
atgcgcttcgagtacatctctgttctagccctttgcggcgcgagtctcgcaagggatcatcagtactgtgcttgccagtccggttctggtgacagcattgatatagatgccaccactcagcttcagaacgataatagtaaatcatatttgtgggctcagacctctccagcatattggtttgctgaccgtcataaacctggtccacgattcgctggcatttatctgaaagctgcaaatggcaaaattgatggcgatacattctataatctttgcattaataatggaggagcagactcaacatgctttgactgctctaaatctcaccaggttagaaacgttatctattgtgatgcggcc

SEQ ID NO: 141 - protein, 119 aa, Fusarium oxysporum
MRFEYISVLALCGASLARDHQYCACQSGSGDSIDIDATTQLQNDNSKSYLWAQTSPAYWFADRHKPGPRFAGIYLKAANGKIDGDTFYNLCINNGGADSTCFDCSKSHQVRNVIYCDAA

SEQ ID NO: 142 - DNA, 523 bp, Fusarium oxysporum
atgcgcttcgagtacatctctgttctagccctttgcggcgcgaggtaatcttagccctttgttatcctacacgcctgtgtagttcgtgtgtttgctaacatggtcttggtctcgcaagggatcatcagtactgtgcttgccagtccggttctggtgacagcattgatatagatgccaccactcagcttcagaacgataatagtaaatcatatttgtggggtatgtatacctcatagtgattgggcaattgggcaagcttacaattctatagctcagacctctccagcatattggtttgctgaccgtcataaacctggtccacgattcgctggcatttatgtaagtctacagcttaggatgattaagtgcctgaactaaccttgactagctgaaagctgcaaatggcaaaattgatggcgatacattctataatctttgcattaataatggaggagcagactcaacatgctttgactgctctaaatctcaccaggttagaaacgttatctattgtgatgcggcc

SEQ ID NO: 143 - DNA, 2787 bp, Artificial Sequence
  cDNA
atggcgccggcggtcattgcatcgcagggtgtcatcatgcggtccctgacgagcaagctcgactcgctgctgctgcagccgccggagccgccgccgcctgcgcaaccgtcgtcgctgcggaagggggagaggaagaagatcctcctcctcagaggcgatctccgacacctgctagatgactactacctcctcgtggagccgccgtcagacaccgcgccaccgccagactcgacggcggcgtgctgggctaaggaggttcgcgagctctcctacgacgtcgacgacttcctcgacgagctaacgacccagctcctccaccaccgcggcggcggcgatggcagtagcactgctggtgccaagaagatgatcagcagcatgatcgcgcggcttcgaggggagcttaaccggcggcggtggatcgccgacgaggtcaccctgttcagggcccgcgtgaaggaggccattcgccgccacgagagctaccatcttggcaggcgcacctcgagctcgaggccgagagaagaagacgacgacgacgatcgcgaggactccgccggcaacgaacgccgccggtttctgtcgctgacgttcgggatggacgacgctgctgtgcacggccagctcgttggtagggatatttcgatgcaaaagctcgtccggtggctggccgacggcgagccgaagctcaaggtggcttccattgttggatccggaggtgttggcaagacgacgctggccacagaattctatcgtctgcatggccggcggttggatgcgccgttcgactgccgggctttcgtgcggacgccccggaagcctgacatgacgaagatcctcaccgacatgctgtcacagctgcggccacaacatcagcatcagtcttcggatgtttgggaggttgatcgactccttgaaactatccggacgcatttgcaagataaaaggtacttcatcataattgaagatttatgggcttcatcaatgtgggatattgttagccgtggtttgcctgataataatagttgcagtagaatactaataacaacagaaattgaacctgtagctttggcatgctgtggatataactcagagcacattattaagattgatccactgggtgatgatgtctcaagtcaattgtttttcagtggagttgttggccaaggaaatgaatttcctggacatcttactgaagtttctcatgacatgataaaaaaatgtggtggcttgccactagcaataactataacagccagacattttaaaagccagctgttagatggaatgcagcaatggaatcacatacaaaaatcattgactacttccaatttgaagaaaaatcctactttgcaggggatgaggcaagtactcaaccttatttacaataatcttcctcattgtttgaaagcatgtctgttataccttagcatctacaaagaggactacataattaggaaggccaacttggtgaggcaatggatggctgaaggtttcatcaattccatagaaaataaagtcatggaagaagttgcagggaactattttgatgaacttgttggtaggggcctggtccaaccagtagatgttaactgcaaaaatgaggtattgtcatgtgtagtgcaccacatggtattaaatttcatcaggtgtaagtcaatagaggagaatttcagcattacattggatcattctcagacgacagtaagacatgctgacaaggttcgccgactctcgcttcacttcagcaatgcacatgatacaacaccactagcaggtttgagactctcacaagttcgatcgatggcatttttcggacaagtcaagtgtatgccttccattgcagattataggcttcttcgagttctgattctttgtttttgggctgatcaagagaaaacaagctatgacctcacaagcatttttgaactgttacaactgagatatctgaagataacaggtaatatcacagttaaacttccagagaagatccaaggactacaacacttgcagacactggaagcagatgcaagagcaactgctgtcctattggatattgttcatacacagtgtttgttgcaccttcgtcttgtactacttgatctgctccctcactgtcacaggtacatcttcaccagcatccccaaatggactggaaagctcaacaatctccgcattttaaacattgcagtcatgcaaatttcccaggatgaccttgacactctcaaaggactgggatctctcactgctctttcgctgcttgttcgaacagcgcctgcgcaaagaatcgtcgctgcgaatgaggggttcgggtctctcaagtacttcatgtttgtctgtacagcaccatgcatgacttttgtggaaggagcaatgccgagtgtgcaaaggttaaatctaaggttcaatgccaacgagttcaagcagtatgactctaaggagacagggttggaacacttggtcgcccttgcagagatctctgcaagaattgggggcactgatgatgatgaatcaaacaaaactgaagtggagtctgccttgaggactgcaattcgcaagcatccgacgccgagcactcttatggttgatatacaatgggtggattggatctttggtgctgaagggagagacttggatgaagatttggcacaacaagatgatcacgggtatggatttttcattctattcccaggttacaacttacaaggattattgagcttctttctttctctgccgtggcttctatctttacctgctatgcatcttcaacctgacttgatgattgtttga

SEQ ID NO: 144 - protein, 928 aa, Oryza sativa
MAPAVIASQGVIMRSLTSKLDSLLLQPPEPPPPAQPSSLRKGERKKILLLRGDLRHLLDDYYLLVEPPSDTAPPPDSTAACWAKEVRELSYDVDDFLDELTTQLLHHRGGGDGSSTAGAKKMISSMIARLRGELNRRRWIADEVTLFRARVKEAIRRHESYHLGRRTSSSRPREEDDDDDREDSAGNERRRFLSLTFGMDDAAVHGQLVGRDISMQKLVRWLADGEPKLKVASIVGSGGVGKTTLATEFYRLHGRRLDAPFDCRAFVRTPRKPDMTKILTDMLSQLRPQHQHQSSDVWEVDRLLETIRTHLQDKRYFIIIEDLWASSMWDIVSRGLPDNNSCSRILITTEIEPVALACCGYNSEHIIKIDPLGDDVSSQLFFSGVVGQGNEFPGHLTEVSHDMIKKCGGLPLAITITARHFKSQLLDGMQQWNHIQKSLTTSNLKKNPTLQGMRQVLNLIYNNLPHCLKACLLYLSIYKEDYIIRKANLVRQWMAEGFINSIENKVMEEVAGNYFDELVGRGLVQPVDVNCKNEVLSCVVHHMVLNFIRCKSIEENFSITLDHSQTTVRHADKVRRLSLHFSNAHDTTPLAGLRLSQVRSMAFFGQVKCMPSIADYRLLRVLILCFWADQEKTSYDLTSIFELLQLRYLKITGNITVKLPEKIQGLQHLQTLEADARATAVLLDIVHTQCLLHLRLVLLDLLPHCHRYIFTSIPKWTGKLNNLRILNIAVMQISQDDLDTLKGLGSLTALSLLVRTAPAQRIVAANEGFGSLKYFMFVCTAPCMTFVEGAMPSVQRLNLRFNANEFKQYDSKETGLEHLVALAEISARIGGTDDDESNKTEVESALRTAIRKHPTPSTLMVDIQWVDWIFGAEGRDLDEDLAQQDDHGYGFFILFPGYNLQGLLSFFLSLPWLLSLPAMHLQPDLMIV

SEQ ID NO: 145 - DNA, 4250 bp, Oryza sativa
atggcgccggcggtcattgcatcgcagggtgtcatcatgcggtccctgacgagcaagctcgactcgctgctgctgcagccgccggagccgccgccgcctgcgcaaccgtcgtcgctgcggaagggggagaggaagaagatcctcctcctcagaggcgatctccgacacctgctagatgactactacctcctcgtggagccgccgtcagacaccgcgccaccgccagactcgacggcggcgtgctgggctaaggaggttcgcgagctctcctacgacgtcgacgacttcctcgacgagctaacgacccagctcctccaccaccgcggcggcggcgatggcagtagcactgctggtgccaagaagatgatcagcagcatgatcgcgcggcttcgaggggagcttaaccggcggcggtggatcgccgacgaggtcaccctgttcagggcccgcgtgaaggaggccattcgccgccacgagagctaccatcttggcaggcgcacctcgagctcgaggccgagagaagaagacgacgacgacgatcgcgaggactccgccggcaacgaacgccgccggtttctgtcgctgacgttcgggatggacgacgctgctgtgcacggccagctcgttggtagggatatttcgatgcaaaagctcgtccggtggctggccgacggcgagccgaagctcaaggtggcttccattgttggatccggaggtgttggcaagacgacgctggccacagaattctatcgtctgcatggccggcggttggatgcgccgttcgactgccgggctttcgtgcggacgccccggaagcctgacatgacgaagatcctcaccgacatgctgtcacagctgcggccacaacatcagcatcagtcttcggatgtttgggaggttgatcgactccttgaaactatccggacgcatttgcaagataaaaggtaattcatgtctacatctatctctagtatttttttcatgaatttacaaactattttctcaaatttccccttttttatccttcatatagtaattaagttagtaactatacatatgaatttaatttactcgacaatgccaataatattttaaattacttttatagtgtcctctattattaaatacaattcgatcgagccatgaatcatactggtaatctaaacaattattatacccacctcattctactaacagcaattgagttgttaatataaatagatatggtctattgcatgaaaaaataaaggtaaagtgtttacattatttctactactagtagcagaactacaaagttgtttgtatttttaattattaaatgtaaatgaaagtacatgtttcatacccttgttatttttttaggcgactaaactactagtacattatttctactactagtagaacaactacaaagttgtttgtatttttaattactaaatgtaaatgaaagtacatgcttcatacccttgttataatattttagactaaactaccacaatggcatgttaacttatagcagtaagttgtaatttattttcttttcattttctcagttgttacaagaacttttttttacttaataaaaaatagtcgtaagggcctcccttgttcggtcaaaaaagaattagactaaactcaatcgtatttgtacataaacaaaatttaaaatataactaaaacgaaacagtgataaaaatggtgcaatttaactgctgcctcttgttttaatgtctgacaatgttgattttgtatatatgtttggccatttattttattcaaattttttacaaatatgaaaaatataatatgtgcttaaattacttttaatgataaaataaatttaagaaaatgataattatatttttaataagatggatgatctaacatatatatgtccaaaagtttgacatcaaacattaaaaacaagagagagtatttgcttaggagtacgtgtctttttccatgccttagaacaggtacaatagcaggttataagctaggccaaacatattttaaagagatataggaagagagagaagagcagcagcctacagatctgtagccagctgcagcacggactctaagacgtaatgtgtgtatgacaggtaggaccaagtattaatagtatagtaagcaactattgtatgaattggctatttggctctagatgatttggagctagtagtcggctatactattaaacttgctcttagatatgtggttaaatttaatttctgaaatttacaagatatagaacatgtcttcaccatgtttgcaaagttgataaaatgaaattgcactcaactttttaaattcagcatgctatcccacgtatagctttttaaatatgatttattttttcgtacattagaagtttaatgtttacgaagtactaaatgttctgcaggtacttcatcataattgaagatttatgggcttcatcaatgtgggatattgttagccgtggtttgcctgataataatagttgcagtagaatactaataacaacagaaattgaacctgtagctttggcatgctgtggatataactcagagcacattattaagattgatccactgggtgatgatgtctcaagtcaattgtttttcagtggagttgttggccaaggaaatgaatttcctggacatcttactgaagtttctcatgacatgataaaaaaatgtggtggcttgccactagcaataactataacagccagacattttaaaagccagctgttagatggaatgcagcaatggaatcacatacaaaaatcattgactacttccaatttgaagaaaaatcctactttgcaggggatgaggcaagtactcaaccttatttacaataatcttcctcattgtttgaaagcatgtctgttataccttagcatctacaaagaggactacataattaggaaggccaacttggtgaggcaatggatggctgaaggtttcatcaattccatagaaaataaagtcatggaagaagttgcagggaactattttgatgaacttgttggtaggggcctggtccaaccagtagatgttaactgcaaaaatgaggtattgtcatgtgtagtgcaccacatggtattaaatttcatcaggtgtaagtcaatagaggagaatttcagcattacattggatcattctcagacgacagtaagacatgctgacaaggttcgccgactctcgcttcacttcagcaatgcacatgatacaacaccactagcaggtttgagactctcacaagttcgatcgatggcatttttcggacaagtcaagtgtatgccttccattgcagattataggcttcttcgagttctgattctttgtttttgggctgatcaagagaaaacaagctatgacctcacaagcatttttgaactgttacaactgagatatctgaagataacaggtaatatcacagttaaacttccagagaagatccaaggactacaacacttgcagacactggaagcagatgcaagagcaactgctgtcctattggatattgttcatacacagtgtttgttgcaccttcgtcttgtactacttgatctgctccctcactgtcacaggtacatcttcaccagcatccccaaatggactggaaagctcaacaatctccgcattttaaacattgcagtcatgcaaatttcccaggatgaccttgacactctcaaaggactgggatctctcactgctctttcgctgcttgttcgaacagcgcctgcgcaaagaatcgtcgctgcgaatgaggggttcgggtctctcaagtacttcatgtttgtctgtacagcaccatgcatgacttttgtggaaggagcaatgccgagtgtgcaaaggttaaatctaaggttcaatgccaacgagttcaagcagtatgactctaaggagacagggttggaacacttggtcgcccttgcagagatctctgcaagaattgggggcactgatgatgatgaatcaaacaaaactgaagtggagtctgccttgaggactgcaattcgcaagcatccgacgccgagcactcttatggttgatatacaatgggtggattggatctttggtgctgaagggagagacttggatgaagatttggcacaacaagatgatcacgggtatggatttttcattctattcccaggttacaacttacaaggattattgagcttctttctttctctgccgtggcttctatctttacctgctatgcatcttcaacctgacttgatgattgtttga

SEQ ID NO: 146 - DNA, 672 bp, Artificial Sequence
  cDNA
atgcttttttattcattatttttttttcacaccgttgcgatttcggccttcaccaacattggcaccttttcacacccagtttacgattacaatccaattccaaaccatatccacggagatttaaaaaggcgggcttatattgaacgctattcccaatgttcagattcgcaggcctccgaaattcgtgccgcgctaaaaagttgtgccgagctcgcctcgtggggctatcacgccgttaaaaatgacaatcggttatttagattaatctttaaaactgacagcacagatattcaaaactgggttcaaaagaattttaacgaaatttacaaggaatgtaacagggacgcggacgaaatttctctaacctgccacgataaaaatgtttatacgtgcgtccgagaaggagttcataatttggcgtatgcacttattaacgaaaaagaaattgttatatgccctcctttcttcaacaaccccgtaaacagcagggaaattactgccggtaaccaagatacagttatattacatgaaatggtgcatataattttaaaagagtggaaagattatggttacgaatgggatgggattcacaaattggatagtacagaaagtattaaaaaccccgacagttatgctatttttgcacaatgtgcacgttataaatattgttaa

SEQ ID NO: 147 - protein, 222 aa, Magnaporthe grisea
MLFYSLFFFHTVAISAFTNIGTFSHPVYDYNPIPNHIHGDLKRRAYIERYSQCSDSQASEIRAALKSCAELASWGYHAVKNDNRLFRLIFKTDSTDIQNWVQKNFNEIYKECNRDADEISLTCHDKNVYTCVREGVHNLAYALINEKEIVICPPFFNNPVNSREITAGNQDTVILHEMVHIILKEWKDYGYEWDGIHKLDSTESIKNPDSYAIFAQCARYKY

SEQ ID NO: 148 - DNA, 882 bp, Magnaporthe grisea
atgcttttttattcattatttttttttcacaccgttgcgatttcggccttcaccaacattggcaccttttcacacccagtttacgattacaatccaattccaaaccatatccacggagatttaaaaaggcgggcttatattgaacgctattcccaatgttcagattcgcaggcctccgaaattcgtgccgcgctaaaaaggtaaattgaaactctttaaaacaaattcggaaaacaatgttaaatattttgtttagttgtgccgagctcgcctcgtggggctatcacgccgttaaaaatgacaatcggttatttagattaatctttaaaactgacagcacagatattcaaaactgggttcaaaagaattttaacgaaatttacaaggaatgtaacagggacgcggacgaaatttctctaacctgccacgataaaaatgtttatacgtgcgtccgagaaggagttcataatttggcgtatgcacttattaacgaaaaagaaattgttatatgccctcctttcttcaacaaccccgtaaacagcagggaaattactgccggtaaccaagatacagttatattacatgaaatggtgcatataattttaagtaagtttgcttttacaaattgataaaacatttacaaaagtttatttataaaaattttcaaaaactaaaaattcaaatttttatttagaagagtggaaagattatggttacgaatgggatgggattcacaagtaagttgtcgaaaaacaaatttgctgaatgttgttttatgttgataaattctaattaatattaagattggatagtacagaaagtattaaaaaccccgacagttatgctatttttgcacaatgtgcacgttataaatattgttaa

SEQ ID NO: 149 - DNA, 3102 bp, Artificial Sequence
  cDNA
atggcggagacggtgctgagcatggcgaggtcgctggtgggcagcgccatcagcaaggccgcctccgctgctgccgacgagaccagcctcctgctgggcgtcgagaaagacatctggtatatcaaagatgagctaaaaacgatgcaagcattccttagagctgctgaacttatgaaaaagaaagatgaactattaaaggtttgggcagagcaaatacgtgacctgtcatatgacattgaagattcccttgatgaatttaaggtccatattgaaagccaaaccctatttcgtcagttggtgaaactcagagaacgccaccgaattgctatccgtatccacaaccttaaatcaagagttgaagaagtgagtagcaggaacacacgctacagtttagtcaagcctatttcctctggcacagagattgacatggattcctatgcagaagacattcgtaatcagtcagctcgcaatgtggatgaagctgagcttgttgggttttctgactccaagaaaaggctgcttgaaatgatcgataccaatgctaatgatggtccggccaaggtaatctgtgttgttgggatgggtggtttaggcaagacagctctttcgaggaagatctttgaaagcgaagaagacattaggaagaacttcccttgcaatgcttggattacagtgtcacaatcatttcacaggattgagctacttaaagatatgatacgccaacttcttggccccagttctctggatcaactcttgcaagaattgcaagggaaggtggtggtgcaagtacatcatctttctgagtacctgatagaagagctcaaggagaagaggtactttgttgttctagatgatctatggattttacatgattggaattggataaatgaaattgcatttcctaagaacaataagaagggcagtcgaatagtaataaccactcggaatgttgatcttgcggagaagtgtgccacagcctcactggtgtaccaccttgatttcttgcagatgaacgatgccataacattgctactgagaaaaacaaataaaaatcatgaagacatggaatcaaataaaaatatgcaaaagatggttgaacgaattgtaaataaatgtggtcgtctaccattagcaatacttacaataggagctgtgcttgcaactaaacaggtgtcagaatgggagaaattctatgaacaccttccttcagaactagaaataaacccaagcctggaagctttgaggagaatggtgaccctaggttacaaccacctaccatcccatttgaaaccatgctttttgtatctaagtatctttcctgaggattttgaaatcaaaaggaatcgtctagtaggtagatggatagcagaagggtttgttagaccaaaggttgggatgacgactaaggatgtcggagaaagttactttaatgagctaatcaaccgaagtatgattcaacgatcaagagtgggcatagcaggaaaaattaagacttgtcgaattcatgatatcatccgtgatatcacagtttcaatctcgagacaggaaaattttgtattattaccaatgggagatggctctgatttagttcaggaaaacactcgccacatagcattccatgggagtatgtcctgcaaaactggattggattggagcattattcgatcattagctatttttggtgacagacccaagagtctagcacatgcagtttgtccagatcaattgaggatgttacgggtcttggatcttgaagatgtgacattcttaatcactcaaaaagatttcgaccgtattgcattgttgtgccacttgaaatacttgagtattggatattcgtcatccatatattcacttcccagatccattggtaaactacagggcctacaaactttgaacatgccgagcacatacattgcagcactaccaagtgagatcagtaaactccaatgtctgcatactcttcgttgtataggacagtttcattatgacaactttagtctaaaccacccaatgaagtgcataactaacacaatatgcctgcctaaagtattcacacctttagttagtcgcgatgatcgtgcaaaacaaattgctgaattgcacatggccaccaaaagttgctggtctgaatcaatcggtgtgaaggtacccaaaggaataggtaagttgcgagacttgcaggttctagagtatgtagatatcaggcggaccagtagtagagcaatcaaagagctggggcagttaagcaagctgaggaaattaggtgtgacaacaaacgggtcgacaaaggaaaaatgtaagatactttatgcagccattgagaagctctcttccctccaatctctccatgtggatgctgtgttattctcaggtattattggaacacttgagtgcctagattctatttcatctcctcctcccctactgaggacactcgtgttggatggaattcttgaggagatgcctaactggattgagcagctcatgcacctgaagaagatctacttattgagcagcaaactaaaggaaggtaaaaccatgctgatacttggggcactgcccaacctcatggtccttcatctttatcggaatgcttaccttggggagaagctagtattcaaaacaggagcattcccaaatcttagaacactttggatttatgaattggatcagctaagagagatcagatttgaggacggcagctcacccctgttggaaaagatagaaataggcgagtgcaggttggaatctgggattactggtatcattcaccttccaaagctcaaggagattccaattagatacggaagtaaagtggctgggcttggtcagctggagggagaagtgaacgcacacccaaatcgccccgtgctgctaatgtacagtgaccgaaggtatcacgacctgggggctgaagccgaaggatcttctatagaagtgcaaacagcagatcctgttcctgatgccgaaggatcagtcactgtagcagtggaagcaacggatccccttcccgagcaggagggagagagctcgcagtcgcaggtgatcacgttgacgacgaatgatagcgaagagataggcacagctcaagctggctga

SEQ ID NO: 150 - protein, 1033 aa, Oryza sativa
MAETVLSMARSLVGSAISKAASAAADETSLLLGVEKDIWYIKDELKTMQAFLRAAELMKKKDELLKVWAEQIRDLSYDIEDSLDEFKVHIESQTLFRQLVKLRERHRIAIRIHNLKSRVEEVSSRNTRYSLVKPISSGTEIDMDSYAEDIRNQSARNVDEAELVGFSDSKKRLLEMIDTNANDGPAKVICVVGMGGLGKTALSRKIFESEEDIRKNFPCNAWITVSQSFHRIELLKDMIRQLLGPSSLDQLLQELQGKVVVQVHHLSEYLIEELKEKRYFVVLDDLWILHDWNWINEIAFPKNNKKGSRIVITTRNVDLAEKCATASLVYHLDFLQMNDAITLLLRKTNKNHEDMESNKNMQKMVERIVNKCGRLPLAILTIGAVLATKQVSEWEKFYEHLPSELEINPSLEALRRMVTLGYNHLPSHLKPCFLYLSIFPEDFEIKRNRLVGRWIAEGFVRPKVGMTTKDVGESYFNELINRSMIQRSRVGIAGKIKTCRIHDIIRDITVSISRQENFVLLPMGDGSDLVQENTRHIAFHGSMSCKTGLDWSIIRSLAIFGDRPKSLAHAVCPDQLRMLRVLDLEDVTFLITQKDFDRIALLCHLKYLSIGYSSSIYSLPRSIGKLQGLQTLNMPSTYIAALPSEISKLQCLHTLRCIGQFHYDNFSLNHPMKCITNTICLPKVFTPLVSRDDRAKQIAELHMATKSCWSESIGVKVPKGIGKLRDLQVLEYVDIRRTSSRAIKELGQLSKLRKLGVTTNGSTKEKCKILYAAIEKLSSLQSLHVDAVLFSGIIGTLECLDSISSPPPLLRTLVLDGILEEMPNWIEQLMHLKKIYLLSSKLKEGKTMLILGALPNLMVLHLYRNAYLGEKLVFKTGAFPNLRTLWIYELDQLREIRFEDGSSPLLEKIEIGECRLESGITGIIHLPKLKEIPIRYGSKVAGLGQLEGEVNAHPNRPVLLMYSDRRYHDLGAEAEGSSIEVQTADPVPDAEGSVTVAVEATDPLPEQEGESSQSQVITLTTNDSEEIGTAQAG

SEQ ID NO: 151 - DNA, 7067 bp, Oryza sativa
atggcggagacggtgctgagcatggcgaggtcgctggtgggcagcgccatcagcaaggccgcctccgctgctgccgacgagaccagcctcctgctgggcgtcgagaaagacatctggtacgtactgcgtgactctcgttaatttattctgtagatgctcaggaatcagcaactattgtgttgatttccatcgtagcatatcgattttgttggccaccaattctaatcggccggaacaagctagtcactaaatctggcaaatcgatcagctgctgagtgcacaaacatgcatgttattctttttttttttgggttatatgttaagcaacaaagccccttggtaagatatgcatggcaaatgaactaatatcgacatacgtaaagcggaggacccctcgttccatgcgtgggtgactcgagcggtgacaaatcctagcacctccacctccttggatggcctgtggtgacgctttcggccccgagtttcccttgaatacatcatctacaaggtgctattaatgtctagtcacatcatttacgaggtgctattattgcctagtctgcccgaagatagtttagacaacactcttggatggcggtgtccttcgcccagtgatgtccaagagcccgtggatgtttagttgtttagacatggtgttgggtggtgcactagtgggcctgatgggccagttgtaggtccagtggtaaccaatcatgcttagcaatagccggatgcccggattggtgcttgttcttttttcggtgtcgacgcatggtagtatttacttttcctgtttttcctgattatagcatcctaggctatactcttctaatttattcatgctatattaatattaaaacttggtatggtttgtttcattcaagacccttggtggtcaaaggcttgtttggttcaagttcattcctagccttaccaactttttggcaatagcaagaaatggtcattgaaaaaaaaaggcaaaaattggctaggcctacagtttatttcctagcaaagttatactttagcattccactaagccaaataattcggcaatgccattttcttatctacatgccaaatatatggctaatattttggcattaattactcttattttttttggcaaaattgatcaaaagttcacatttttagctctatagtattaaaagttatctattcactttaatagaccgaaagtttactcggttccgtttttagcactaccgtctcttttctcttgatttgccgtcaattttgaccggcagtcctacccccaggagacattgagcagcagcccgtgatccccctctctcgccgccggtgacgctgtggtggcatcgttcctgctgcgggcagaataagtctggcgtcatcgccctatcgcctggagctgcaaccaccactaccgggcccatcgatcgtctagagcgttatccaccctgcctgccccattacttgcagctccggctgggtcagaacctctccatgcctgataaattggttcaagattgtcgctgtccggccagcgcttgaattttcagaatatgccatcgaatacgcgctgcttttaagatatgctacccgattcatgctatttttagaatacgccatcagaacacgaattttcttcgttccgtgccactccgtctctcggagtcagtcgtgccgtcgtcatccgtccgcccagcactgtcgtcgtcagtccgccacccgtgcctgactgtccgttcagctgcgccgtcgtccgtccgtcgccgccatcgccgtcgtccactgtcgcgcccgcacctgcacccgtgtcaggcgcgccgtcgtccgtccgctgtcaccatcatcgtcgtccactgcggcgagcgcagacggctgtggacggatgattgcgcggcaagcgcaagcggcggtggacggacgacggggcagtgcacgcgagcacggtagccgatggactgacgttggcggcattgggagatggacgacgacggcatgattgacgtggggaacggaatgtcacggaacggagaaaattcgcactccggtggcatatattccgaaaatagcacgaattgggtggcatatcttaaaaacagtgcctatttggtggcatattctaaaaattctcggtcagcataatccccatcaatccccaatccctcaacagttgggttaatattcctggagatgtgttcggttgtttaggttgaagttctccacttcacctccatgagtacatgcacctctacacgtacgttcttaatgtgtttgtttgttctatcctccgcttgggttctattttgttggttccgatctgatttgatctggagcggggtcgatcttccacgacggcgagagagacgttgttcgggctgctcgattaggttcaactgtttaggtcgaagggaggggtagaattgcaattcaagtgcatggtcagtcaatttgggtcaaaattaacatcaaactgggataaagagacgacagtgccaaaattggtaacgggaaaactttgagttctattaaagtgaaccagtaactttcgttgctatagaataaaaacgtaaacttttaatgctccttggttgagcttggtacaaaccaaacagacgtaaaataaacactatcctgaatcaagtctactaagttccattgaactcaaccaggatacgtacacttcctcttagaagatgtcttgttttcactttgtacaattttttctattgtaaatttggtacctcgttgtacctaggtacaagaggtaccatgagataccaaattttacactaaaattttggtacctcatggtacctcctcaacgaccgtagaattgctcttaatttaatttaaaaaaaacataatatttttaaagcatattatggaaattttagtaattattacttttgtaatatatgagttacggttatactcgagatatcctaaattgcttggagatgaataattacaaggtatatcaaagatgagttgaaaataatgcaggcattccttagagctgcagaagttatgaaaaagaaagacgaactattaaaggtttgggcagagcaaatacgtgacctgtcatatcacattgaagattcccttgatgaatttaaggtccatgttgaaagtcaaaccctatttcgtcagttggtgaaacttagatagcgtcaccggatcgctagcccgtggatgtttagttgtttgcacatggtgctggatggtgcgctcatggtcttgttgtaggtctggtaccaaccagtcatgcttagaaatagccggatcagtgcacggtgctaggactttacttggtggtctgtgcagcgctatcgacatgtggtggtgtgctttttttttttccggattacaatctcatagggctacactctagttattttgctgctatattaatatgaaaacttggtatggttcgtttcttttagaaaaaaacctagttgatcaagggctagttttcttcaagtgcattcctaatcttagcttcttttttttttgcaatggcaagaattgttcattaaaaaaattgataaaaattggctaggcctacgttttgtttcttaccaaagttgtactttaacaataaactaaggcaaatatttcggcaatgccattttcttgtctacagaccaaatatatggctaaattttggcataaccatttttttgtttgcttggttgagcttggtacaaaccaaacagacccaaaataaacagtgtcatgaatcacgtctactaaattcctttgaactgaactagaatatagttgctcttaaaagatttcttgatttcactcggtaccatttactagtacaaacttagatttaatttttaaaaataaaatcataatattgttattatggaaaatttagtcatagtacttttgtaatatatgagatgggttatacttgagatatcctaaattgctttaagatgaataattgctaggtatatcaaagatgagctaaaaacgatgcaagcattccttagagctgctgaacttatgaaaaagaaagatgaactattaaaggtttgggcagagcaaatacgtgacctgtcatatgacattgaagattcccttgatgaatttaaggtccatattgaaagccaaaccctatttcgtcagttggtgaaactcagagaacgccaccgaattgctatccgtatccacaaccttaaatcaagagttgaagaagtgagtagcaggaacacacgctacagtttagtcaagcctatttcctctggcacagagattgacatggattcctatgcagaagacattcgtaatcagtcagctcgcaatgtggatgaagctgagcttgttgggttttctgactccaagaaaaggctgcttgaaatgatcgataccaatgctaatgatggtccggccaaggtaatctgtgttgttgggatgggtggtttaggcaagacagctctttcgaggaagatctttgaaagcgaagaagacattaggaagaacttcccttgcaatgcttggattacagtgtcacaatcatttcacaggattgagctacttaaagatatgatacgccaacttcttggccccagttctctggatcaactcttgcaagaattgcaagggaaggtggtggtgcaagtacatcatctttctgagtacctgatagaagagctcaaggagaagaggtactttgttgttctagatgatctatggattttacatgattggaattggataaatgaaattgcatttcctaagaacaataagaagggcagtcgaatagtaataaccactcggaatgttgatcttgcggagaagtgtgccacagcctcactggtgtaccaccttgatttcttgcagatgaacgatgccataacattgctactgagaaaaacaaataaaaatcatgaagacatggaatcaaataaaaatatgcaaaagatggttgaacgaattgtaaataaatgtggtcgtctaccattagcaatacttacaataggagctgtgcttgcaactaaacaggtgtcagaatgggagaaattctatgaacaccttccttcagaactagaaataaacccaagcctggaagctttgaggagaatggtgaccctaggttacaaccacctaccatcccatttgaaaccatgctttttgtatctaagtatctttcctgaggattttgaaatcaaaaggaatcgtctagtaggtagatggatagcagaagggtttgttagaccaaaggttgggatgacgactaaggatgtcggagaaagttactttaatgagctaatcaaccgaagtatgattcaacgatcaagagtgggcatagcaggaaaaattaagacttgtcgaattcatgatatcatccgtgatatcacagtttcaatctcgagacaggaaaattttgtattattaccaatgggagatggctctgatttagttcaggaaaacactcgccacatagcattccatgggagtatgtcctgcaaaactggattggattggagcattattcgatcattagctatttttggtgacagacccaagagtctagcacatgcagtttgtccagatcaattgaggatgttacgggtcttggatcttgaagatgtgacattcttaatcactcaaaaagatttcgaccgtattgcattgttgtgccacttgaaatacttgagtattggatattcgtcatccatatattcacttcccagatccattggtaaactacagggcctacaaactttgaacatgccgagcacatacattgcagcactaccaagtgagatcagtaaactccaatgtctgcatactcttcgttgtataggacagtttcattatgacaactttagtctaaaccacccaatgaagtgcataactaacacaatatgcctgcctaaagtattcacacctttagttagtcgcgatgatcgtgcaaaacaaattgctgaattgcacatggccaccaaaagttgctggtctgaatcaatcggtgtgaaggtacccaaaggaataggtaagttgcgagacttgcaggttctagagtatgtagatatcaggcggaccagtagtagagcaatcaaagagctggggcagttaagcaagctgaggaaattaggtgtgacaacaaacgggtcgacaaaggaaaaatgtaagatactttatgcagccattgagaagctctcttccctccaatctctccatgtggatgctgtgttattctcaggtattattggaacacttgagtgcctagattctatttcatctcctcctcccctactgaggacactcgtgttggatggaattcttgaggagatgcctaactggattgagcagctcatgcacctgaagaagatctacttattgagcagcaaactaaaggaaggtaaaaccatgctgatacttggggcactgcccaacctcatggtccttcatctttatcggaatgcttaccttggggagaagctagtattcaaaacaggagcattcccaaatcttagaacactttggatttatgaattggatcagctaagagagatcagatttgaggacggcagctcacccctgttggaaaagatagaaataggcgagtgcaggttggaatctgggattactggtatcattcaccttccaaagctcaaggagattccaattagatacggaagtaaagtggctgggcttggtcagctggagggagaagtgaacgcacacccaaatcgccccgtgctgctaatgtacagtgaccgaaggtatcacgacctgggggctgaagccgaaggatcttctatagaagtgcaaacagcagatcctgttcctgatgccgaaggatcagtcactgtagcagtggaagcaacggatccccttcccgagcaggagggagagagctcgcagtcgcaggtgatcacgttgacgacgaatgataggtcagtcactccctacatggcagcttaattaacttgtttctaattctcttcttgttcagtattagccatcaggtgagggcgatgatttcaactcacttttcatctctctcgttttcttaacctgacagcgaagagataggcacagctcaagctggctga

SEQ ID NO: 152 - DNA, 327 bp, Artificial Sequence
  cDNA
atgcagttctcaaccatcatcaccgtgtgcctcttcaccgggctcgcctccgccagcttcgtacaatgcaatcatcatctcctgtacaatggcagacactggggcacgataaggaagaaggcgggttgggccgttagattttacgaagaaaaaccagggcagccaaagaggctggtcgcgatttgcaaaaacgcgtcacccgtacactgcaactatctgaaatgcaccaatttggcagcaggcttctcggcagggacgtccactgatgttctctcctccggcaccgttggctcgattgggaatgaccctcaggctcagcgccaatag

SEQ ID NO: 153 - protein, 108 aa, Magnaporthe grisea
MQFSTIITVCLFTGLASASFVQCNHHLLYNGRHWGTIRKKAGWAVRFYEEKPGQPKRLVAICKNASPVHCNYLKCTNLAAGFSAGTSTDVLSSGTVGSIGNDPQAQRQ

SEQ ID NO: 154 - DNA, 2991 bp, Artificial Sequence
  cDNA
atggaggccgcgcttttgagcggattcatcaaggccatcctgccgaggctcttctccctcgtcgacgataagcataagctccacaagggcgtcaagggcgacatcgatttcctcatcaaggagctccgcatgatcgtcggcgccatcgacgacgacctctccctcgaccaccccgccgccgccgccgtacagacgctatgcatggaggacctacgcgagctcgcccacggcatcgaggactgcatcgacggcgtcctgtaccgcgccgccagggaccagcagcagtcaccggtccgccgcgccgtccaggcccccaagaagctccagagaaacctgcagcttgcccagcagctgcagcggctgaagaggatggcggcggaggcgaaccagcggaagcagaggtacacggcggcggcgcccggtcaacacggtcaggtctactcatcggctgcggcgcaggtggatgagccatggccgtcgtgctcatctgcctcagatccgcgcatccacgaggcggacctggtcggcgtcgacgcggaccgggaggagctcctggagcagctggcggagcggcagccggagcagctcaaggtgatcgccatcgtcgggttctgcgggctggggaagaccgccctcgccgcggaggcgtacaaccgagagaccggcggcgggagattcgagaggcacgcgtgggtttgcgccgggcaccggagtgcacgggaggtgctcggcgaattgctccgcaggcttgacgccgacggccgttctttccatggggactccgatgctggtcagctgtgtgtagatatcagacagcagttggagaagaacaggtacttcattgttatcgatgacattcaaacagaagatcagtggaaaagcatcaaatcggcttttccgactgataaggatattggcagcagaatagtggtcacgacgaccatccagtcagtagctaatgcctgctgttctgcgaatgggtatttgcacaaaatgagcaggcttgataagaactgctcaaagcaattgttgtccaagaaagcttgcccagagaggtattcacattacaagcagccagattcagcagcaattttgaagaaatgtgatggccagccacttgctcttgttaccataggtgaattcctgcaagctaatggctggccaacggggcctaactgtgaagatctctgcaaccggctacattatcacctagagaatgataaaacacttgaaaggatgtggcgagtgctggtccgcaactacaccagtctacctggccatgctctcaaggcctgcttactatattttggcatgttcccatctgatcatccaatcaggaggaaaagtctgctgaggcgatggttggccgagggatttgtagaaccactgtcttcatcgagtaacatagattccacggctgctttcaatgtgctaatggaccggaacatcattgagcccatcaatgtaagcaataatgataaagtcaagacatgccaaacgtacggtatgatgcgtgaattcatatcgcatatgtcaatctctcagaactttgtcacctttttctgtgatgacaagttcgtgcccaaatatgttcgtcggctttctctccatggtgacactgttgtgaatggtgataacttcaacggtattgatttatcacttgtacggtctctggcagtctttggggaggcaggtacaaccgtattagacttcagcaagtatcaattgctgcgagttttagatcttgaaaaatgtgatgatttgaaggatgatcatctcaaagaaatatgcaatctggtgcttctgaaatatctgagccttgggggtaatatctccaaacttccaaaggatattgccaaattgaaagatttggaggcactcgatgtaaggagatcgaaagtaaagataatgccggtagaagtcttcgggttgccatgcctaattcatctgcttggaaaatttaagctctcagataaagtcaagcagaagactgaagtgcaagagtttctcttgaaaggaaaaagcaacttgcagacgctagcaggatttgctagcaacggaagcgaagggtttctgcatcttatgaggtacatgaataagttgagaaagttgaagatttggtgtacgtcgtctgcaggtagcaccgattggactgatcttagggaggccattcaacagttcattctggatgaaaaggaagcaaatattggtacccgttctttatcgcttcatttcagtggatgctctgaagatgcgataaattccttaaaagaaccctgctacctcagctcgttgaaattacatggcaacttcccccaattgcctcagtttgttacatcacttcgtggtctcaaggagctttgcctttcatctactaaatttacaacaggccttcttgaagccttgagtaatttgagctacttgcagtatctcaaactggttgccgatgaacttgagaagttcatcataaaagttcaggggttccccaggctgctacgcctttgtattgtgctacaatatccaacattcccagtaattgaagaaggagctctgccatttcttgtcacacttcagctgctatgcaaagatctacatggcctttctgacatccaaattgaatgttttaaacatcttcaggaggtaactcttcattctggagtcactccagctacaagacaggaatgggtaaaggctgctaaggagcatccgaataggccaaaagtattgcttctcaaatctgttgatacagcagaaagtgaacatacagacgttgatagtgtaatggaggcagtcaaaagtgagactacagaatattctattgcaccagagggaccagaacaagtgaacaacaaaatgcaacttgaccatggattggaatcctcttctgtgctgaacaaacaaaacaactttgcagaccaatcaagctcaaaagatcaactgcattattctttcaacaatatggggctttcagatgtctcctgctgtgagtga

SEQ ID NO: 155 - protein, 996 aa, Oryza sativa
MEAALLSGFIKAILPRLFSLVDDKHKLHKGVKGDIDFLIKELRMIVGAIDDDLSLDHPAAAAVQTLCMEDLRELAHGIEDCIDGVLYRAARDQQQSPVRRAVQAPKKLQRNLQLAQQLQRLKRMAAEANQRKQRYTAAAPGQHGQVYSSAAAQVDEPWPSCSSASDPRIHEADLVGVDADREELLEQLAERQPEQLKVIAIVGFCGLGKTALAAEAYNRETGGGRFERHAWVCAGHRSAREVLGELLRRLDADGRSFHGDSDAGQLCVDIRQQLEKNRYFIVIDDIQTEDQWKSIKSAFPTDKDIGSRIVVTTTIQSVANACCSANGYLHKMSRLDKNCSKQLLSKKACPERYSHYKQPDSAAILKKCDGQPLALVTIGEFLQANGWPTGPNCEDLCNRLHYHLENDKTLERMWRVLVRNYTSLPGHALKACLLYFGMFPSDHPIRRKSLLRRWLAEGFVEPLSSSSNIDSTAAFNVLMDRNIIEPINVSNNDKVKTCQTYGMMREFISHMSISQNFVTFFCDDKFVPKYVRRLSLHGDTVVNGDNFNGIDLSLVRSLAVFGEAGTTVLDFSKYQLLRVLDLEKCDDLKDDHLKEICNLVLLKYLSLGGNISKLPKDIAKLKDLEALDVRRSKVKIMPVEVFGLPCLIHLLGKFKLSDKVKQKTEVQEFLLKGKSNLQTLAGFASNGSEGFLHLMRYMNKLRKLKIWCTSSAGSTDWTDLREAIQQFILDEKEANIGTRSLSLHFSGCSEDAINSLKEPCYLSSLKLHGNFPQLPQFVTSLRGLKELCLSSTKFTTGLLEALSNLSYLQYLKLVADELEKFIIKVQGFPRLLRLCIVLQYPTFPVIEEGALPFLVTLQLLCKDLHGLSDIQIECFKHLQEVTLHSGVTPATRQEWVKAAKEHPNRPKVLLLKSVDTAESEHTDVDSVMEAVKSETTEYSIAPEGPEQVNNKMQLDHGLESSSVLNKQNNFADQSSSKDQLHYSFNNMGLSDVSCCE

SEQ ID NO: 156 - DNA, 3351 bp, Artificial Sequence
  cDNA
atggatgctccggcgagcttttccctaggtgccatgggccctctcctcaggaagctcgattcgcttctggtggctcccgaaatccggctgcctaagccattgaaggagggaatcgagctgctcaaggaagatctagaagagataggcgtctccctggtggagcactccgtggtcgattcaccaacccacaaggcaagattctggatggatgaggtgcgtgacctctcctaccacatcgaggactgcatcgacaccatgttttcgatgcgctccggcggcgacgacggcaagcccagatccgagcgccgccacaaggttggccgtgcgaagatcgacggtttctccaagaagcccaagccgtgcacaaggatggctaggatcgcggagctcagggctctggtgcgggaggcgagcgagcggctcgaaaggtaccagcttggtgacgtctgcggctcgagctctcccgttgtgttcaccgcggatggtcgggctcgacctctccaccatggggtttctgctaatcttgttggcgtcgatgagttcaagacgaagctgaacaggtggctcagcgacgaggaggggccgcacctgaaggttgctgccattgttggacctgcagggattggtaagacggcacttgctacagagttgtaccgtgaccatagatggcaattcgagtgccgagctttcgtccgggcgtcgcgaaagcctgacatgcagcggcttcttgggggtattctctctcaagttcagcgtcgccaacgatcgtctgatgcctacgctgacagcacggtgcagagcctcattgataatctccgggagcatctccaagataggaggtaccttattataattgatggtttgtgggagacggcagtatggaatattgctaacagtgcttttccagatgttaacagtttcagtagaatattaataactgcggatatcgaacaggtagctctggaatgctgcggttacaagtatgattatattatgaggatggaacctcttggcagccttgattccaaaaaagttttcttcaataaagtttttggctccgaagatcaatgtcctcctgagttgaaggaggtgtcaaacacaatcctagaaaaatgtggtggtttgccacttgcaatcatcagcatagcaggtcttctaggaagccaaccggaaaatccagtgctatgggactatgtaacgaaatatctatgttccagtttgggtacaaatcctactttgaaagacgtggtgaaagaaacgctaaaccttagctacaacagtcttcctcatccgttcaaaacatgtctgctatatcttggtatgtatcctgatgggcacataatgttgaaggctgatttgatgaagcaatggtcagctgaaggttttgtctctgccaatgaagcaaaagacacagaagaaattgtagataaatactttgatgagcttgtcaacaggggaattctagaacctgttgagattaacaagaatggcaaggtgttgtcctgtaccctgcaccacgctgtacatgaccttgtcatgcccaaattcaacgatgacaaatttactatgtcagtagattactctcagactattacaggaccttctaccatggttcgtcgtttgtcccttcatttcagcagtaccagatacgcgacaaaacctgcaggaataatattgtcacgagttcgatcacttgccttttttggcctcctcaattgtatgccttgtattggggaatttaagttactgcgagttctaatcctagaattttggggcagtcatggtgagcaaaggagtttaaacctaataccagtatgtagattatttcagctgagatatttgaaaacttcaggtgatgtagttgttcagttaccagctcagataagtgggctacagtacttggaaacactggaaatagacgcaagagtgtcagctgttccatttgatcttgttcatctcccgaacctactgcatctccaacttcaagatgagacaaaattacctgatgggattggctgcatgagatctttgcgtacactacagtactttgaccttggtaacaactctgtagacaacttacggggtcttggagagctgacaaacctgcaggatcttcatctcagctattctgcaccgtcatctaatgagggtttgatgataaatctgaatgctataacctcttcacttagcagacttagtaacctcaaatctctgattctatcaccaggtgctataagcatggttattttctttgatatatcaagcatcatatctgtggttcctgtatttcttcagagacttgagctgttgccacccatctgcatcttttgcagacttcccaagtcgattggacaacttcacaaactctgcattttgaaagtttccgttagagaacttctgacaactgatattgataacctcacaggattaccttccctcacagttctctcattatatgctcagacagctccagagggaaggtttatcttcaaagacgggactctcccagttctcaagtatttcaaatttggatgtggtgaactctgccttgcttttatggctggagcaatgcccaatctccagaggctcaaattagttttcaacatccgtaaaagtgagaagtaccgccatacgctttttgggattgagcaccttgtaagcctccaggatattgccacacgaattggggttgacaccagcaccggcgaatctgatagaagggctgcagagtcagcattcaaggaaactgtcaacaagcatccaaggtgtcttaggtccagcttgcagtgggtggtttccactgaggaagaaagtcatcctttggagaaacaacatcataagagagaaaaaggctcatcagctggacatggggttttagagaaagaatcagtggaagatagcgagaagaacactgatagagtgcaaacattattgtcaccccaactgtcaaacatggagagtgtggtggaaagtgcattaacggggcaacgaactaagatagttgttaaggtgcacatgccatgcggaaaatcccgagcaaaagccatggcgctggctgcgtcagtgaacggggtggacagcgtggagataacgggggaggacaaagaccggctggtggtggtcggccgtggcattgaccctgttcgcctggtggctctcctgcgcgagaaatgtggcctcgccgagctcttgatggtggagttagttgagaaagagaagacacagctggctggaggaaagaaaggtgcatacaagaagcaccctacctacaatttatcgccgtttgactatgtagagtatccaccttcagcaccaataatgcaagatattaacccttgctcaaccatgtga

SEQ ID NO: 157 - protein, 1116 aa, Oryza sativa
MDAPASFSLGAMGPLLRKLDSLLVAPEIRLPKPLKEGIELLKEDLEEIGVSLVEHSVVDSPTHKARFWMDEVRDLSYHIEDCIDTMFSMRSGGDDGKPRSERRHKVGRAKIDGFSKKPKPCTRMARIAELRALVREASERLERYQLGDVCGSSSPVVFTADGRARPLHHGVSANLVGVDEFKTKLNRWLSDEEGPHLKVAAIVGPAGIGKTALATELYRDHRWQFECRAFVRASRKPDMQRLLGGILSQVQRRQRSSDAYADSTVQSLIDNLREHLQDRRYLIIIDGLWETAVWNIANSAFPDVNSFSRILITADIEQVALECCGYKYDYIMRMEPLGSLDSKKVFFNKVFGSEDQCPPELKEVSNTILEKCGGLPLAIISIAGLLGSQPENPVLWDYVTKYLCSSLGTNPTLKDVVKETLNLSYNSLPHPFKTCLLYLGMYPDGHIMLKADLMKQWSAEGFVSANEAKDTEEIVDKYFDELVNRGILEPVEINKNGKVLSCTLHHAVHDLVMPKFNDDKFTMSVDYSQTITGPSTMVRRLSLHFSSTRYATKPAGIILSRVRSLAFFGLLNCMPCIGEFKLLRVLILEFWGSHGEQRSLNLIPVCRLFQLRYLKTSGDVVVQLPAQISGLQYLETLEIDARVSAVPFDLVHLPNLLHLQLQDETKLPDGIGCMRSLRTLQYFDLGNNSVDNLRGLGELTNLQDLHLSYSAPSSNEGLMINLNAITSSLSRLSNLKSLILSPGAISMVIFFDISSIISVVPVFLQRLELLPPICIFCRLPKSIGQLHKLCILKVSVRELLTTDIDNLTGLPSLTVLSLYAQTAPEGRFIFKDGTLPVLKYFKFGCGELCLAFMAGAMPNLQRLKLVFNIRKSEKYRHTLFGIEHLVSLQDIATRIGVDTSTGESDRRAAESAFKETVNKHPRCLRSSLQWVVSTEEESHPLEKQHHKREKGSSAGHGVLEKESVEDSEKNTDRVQTLLSPQLSNMESVVESALTGQRTKIVVKVHMPCGKSRAKAMALAASVNGVDSVEITGEDKDRLVVVGRGIDPVRLVALLREKCGLAELLMVELVEKEKTQLAGGKKGAYKKHPTYNLSPFDYVEYPPSAPIMQDINPCSTM

SEQ ID NO: 158 - DNA, 270 bp, Artificial Sequence
  cDNA
atgaaagtccaagctacattcgccacccttatcgcccttgcggcttactttccagcagccaatgcttggaaagattgcatcatccaacgttataaagacggcgatgtcaacaacatatatactgccaataggaacgaagagataactattgaggaatataaagtcttcgttaatgaggcctgccatccctacccagttatacttcccgacagatcggtcctttctggcgattttacatcagcttacgctgacgacgatgagtcttgttga

SEQ ID NO: 159 - protein, 89 aa, Magnaporthe grisea
MKVQATFATLIALAAYFPAANAWKDCIIQRYKDGDVNNIYTANRNEEITIEEYKVFVNEACHPYPVILPDRSVLSGDFTSAYADDDESC

SEQ ID NO: 160 - DNA, 258 bp, Artificial Sequence
  cDNA
atgcatttttcgacaattttcatcccctttgccttagctgctctaaaagtaagcgctgcgccagctagattttgcgtctattacgacggccaccttcccgcgacacgtgtcctgcttatgtacgttagaatcggcactacagcgactattacggcccgtgggcacgaattcgaagttgaagcaaaagaccagaattgcaaagttattctcaccaatggcaaacaagcaccggattggcttgctgccgagccttactag

SEQ ID NO: 161 - protein, 85 aa, Magnaporthe oryzae
MHFSTIFIPFALAALKVSAAPARFCVYYDGHLPATRVLLMYVRIGTTATITARGHEFEVEAKDQNCKVILTNGKQAPDWLAAEPY

SEQ ID NO: 162 - DNA, 3078 bp, Artificial Sequence
  cDNA
atggttggcgccgagatgcttgtggccgcggcggtgagccaggtcgcccggaagatcaacgacatcgtgggggtcgcgcagggcgaggtgaagctgtgctgcaatttcagcgacgatttggagggcatcaaggatacccttgtgtacctggaaaccttgctgaaaaatgcggagaataactccttcggaagcgacagggccaacctgcgccactggcttggccagatcaagtccctggcttacgatatcgaagatatcgttgatgggtactactcttccaaggagcagttcgatgggggcagctatgcacagaaggggtcattattctgctcgctatccaatccaatgcttctgaaaggtagcatggtttataagatgaaatccaagagagagatgctacagcaaagccaacagttgcccaatcagtatcatttcctttcatatatcaattcagctgtgcattattttgaggagaagcaaacaacatcatacagaaatactgacattgcaattgtcgggagggatgctgatttggatcatctcatggatcttttaatgcaaaacagcgctgaagagctttgtattatacccatagttgggcctgtaggttttggaaagacaagccttgcacagttagttttcaatgatacaagaacagaggtattcagctttaggatatgggttcatgtttccatgggtaatatcaaccttgaaaaaattgggagagatatagtttcacaaactacagaaaaaattgagggaaatatgcagctgcagtcaatcaagaatgctgttcagcgtgtgctaaataaatatagttgcttgatcataatagacagcctttggggaaaggatgaagaagtgaatgaattgaagcagatgttgcttacaggtagacacacagaaagcaagatcatagtgaccactcatagcaataaagtagctaagctgatttccaccgttccactgtacaagttggcagctttatctgaggatgattgtttaaaaatattctctcaaagggcaatgacaggtccgggtgacccgttgttcagggaatatggagaagaaatcgttagaaggtgtgaaggcacacccttggtagccaattttctcggttctgtggtgaatgctcaacgacaaaggcgtgagatttggcaagctgcaaaggataaagaaatgtggaagatagaggaagattatccccaagacaaaacttcaccactatttccatcattcaagataatatattataatatgccccatgagctaagattatgctttgtatattgttcaatcttccctaaaggaactgttatagaaaagaagaaacttattcagcaatggattgcacttgacatgattgagtccaaacatggaaccttgccacttgatgtaactgcggagaaatatattgatgaacttaaagcaatctatttccttcaagttttagagcggtctcagaatgatgcagaaagatccagtgcttctgaggaaatgcttcgcatgcataacttggctcatgatcttgctagatcggttgctggtgaagatatccttgttattttagatgccgagaatgagcgcaatgccagatattgcgattaccgttatgcacaggtgtctgcttctagtttagagtcaatcgatcgcaaggcatggccttccaaggcaaggtcactaattttcaagaatagtggtgcggactttgagcgtgtcagtgaagttctttcagtgaacaaatacctgcgtgttttggatctcagtggatgttgtgttcaagatattccatctcctatctttcagctgaaacaattgagatacctcgacgtttcatctttatctattacagcactccctctgcaaattagtagctttcataagttacaaatgttggatctttcagaaactgaactaacagagttgccaccctttataagcaacttaaaaggactgaattatttgaatctccaaggttgccagaaacttcaacgattgaatagccttcatttgttgcatgatctacattacctaaacttgtcatgctgccctgaagttactagttttcctgaatctattgaaaatctgaccaaactccgtttcttgaatctttctggatgctctaagctttcaacattacctatcagatttttggaatcatttgctagcctctgttctttggtagatcttaacttaagtggctttgaattccaaatgttgcccgacttttttggcaacatatattcacttcagtatttaaatctgtcaaaatgtttgaaacttgaggtattaccacaatcttttggccaacttgcatatctgaaaagcctaaatctttcatattgttctgatcttaaactgctggaatcctttgaatgccttacctctcttcggtttttgaatctctcgaactgctctaggcttgaatatttgccatcgtgctttgacaagcttaataatttagagtctctgaatttatcacaatgtcttggacttaaagcactacctgaatcacttcaaaaccttaaaaatcttcagcttgatgtttctgggtgtcaggattgtatagtacaatccttttctctaagtaccagaagttcccagtcctgccaacggtcggagaaagctgagcaggtcagatcaagaaacagtgaaatttcagagatcacttatgaggaacctgctgagattgaacttttaaagaataatccaagtaaagatttggcctccatctcacacctaaatgaggatagaattgaggagcctgaagttgtcactgagccaagtgcaactagaggtatggtacaacagattccaggaaaccagctctcatcgccttcatctcatctttcttcctttgcatcaagctcagcgccatttgcatcctcctcttcggacacctcaacaagtgagcatccagtgcctaatgaagaggcggcagctttgacagttcctcggtccaacgagaaatgcgacaacactcccatgccggtaaaagatggcctgatatctgaagatgatgcaccggtacatctgcatcagaagcccctgcaggcgacagccatggcagccatatga

SEQ ID NO: 163 - protein, 1025 aa, Oryza sativa
  cDNA
MVGAEMLVAAAVSQVARKINDIVGVAQGEVKLCCNFSDDLEGIKDTLVYLETLLKNAENNSFGSDRANLRHWLGQIKSLAYDIEDIVDGYYSSKEQFDGGSYAQKGSLFCSLSNPMLLKGSMVYKMKSKREMLQQSQQLPNQYHFLSYINSAVHYFEEKQTTSYRNTDIAIVGRDADLDHLMDLLMQNSAEELCIIPIVGPVGFGKTSLAQLVFNDTRTEVFSFRIWVHVSMGNINLEKIGRDIVSQTTEKIEGNMQLQSIKNAVQRVLNKYSCLIIIDSLWGKDEEVNELKQMLLTGRHTESKIIVTTHSNKVAKLISTVPLYKLAALSEDDCLKIFSQRAMTGPGDPLFREYGEEIVRRCEGTPLVANFLGSVVNAQRQRREIWQAAKDKEMWKIEEDYPQDKTSPLFPSFKIIYYNMPHELRLCFVYCSIFPKGTVIEKKKLIQQWIALDMIESKHGTLPLDVTAEKYIDELKAIYFLQVLERSQNDAERSSASEEMLRMHNLAHDLARSVAGEDILVILDAENERNARYCDYRYAQVSASSLESIDRKAWPSKARSLIFKNSGADFERVSEVLSVNKYLRVLDLSGCCVQDIPSPIFQLKQLRYLDVSSLSITALPLQISSFHKLQMLDLSETELTELPPFISNLKGLNYLNLQGCQKLQRLNSLHLLHDLHYLNLSCCPEVTSFPESIENLTKLRFLNLSGCSKLSTLPIRFLESFASLCSLVDLNLSGFEFQMLPDFFGNIYSLQYLNLSKCLKLEVLPQSFGQLAYLKSLNLSYCSDLKLLESFECLTSLRFLNLSNCSRLEYLPSCFDKLNNLESLNLSQCLGLKALPESLQNLKNLQLDVSGCQDCIVQSFSLSTRSSQSCQRSEKAEQVRSRNSEISEITYEEPAEIELLKNNPSKDLASISHLNEDRIEEPEVVTEPSATRGMVQQIPGNQLSSPSSHLSSFASSSAPFASSSSDTSTSEHPVPNEEAAALTVPRSNEKCDNTPMPVKDGLISEDDAPVHLHQKPLQATAMAAI

SEQ ID NO: 164 - DNA, 213 bp, Artificial Sequence
  cDNA
atgcaactttccaaaattactttcgctattgcattatatgcaatcggaatcgcagcacttcccactccggccagcctgaatggcaacactgaggtcgcaaccatctccgacgttaaacttgaggcccgcagcgacaccacttatcataaatgctccaaatgcggttatggcagcgatgattccgacgcgtattttaatcataaatgcaactaa

SEQ ID NO: 165 - protein, 70 aa, Magnaporthe oryzae
MQLSKITFAIALYAIGIAALPTPASLNGNTEVATISDVKLEARSDTTYHKCSKCGYGSDDSDAYFNHKCN

SEQ ID NO: 166 - DNA, 3432 bp, Oryza sativa
  cDNA
atggaggcggctgccatggccgtaaccgcagccacgggggccttggcgcccgtgctagtgaagctggccgctttgctggacgacggggagtgcaatcttctggaggggagccggagcgacgcagagttcatcagatccgagctggaggccgtgcactctctcctcaccccaaatatcttggggaggatgggggatgacgatgcggcgtgcaaggatggcttgattgcggaggtccgggagctgtcctacgacctggatgatgccgtcgacgacttcttggagctcaatttcgagcagcgaagaagcgcaagccctttcggtgagctcaaggcaagagttgaggagcgtgtctccaatcgcttctctgactggaagctaccggcggcgagccttccgccgtcgtcggtacaccgtcgagctggcttgccgccaccagatgcagggctggtggggatgcacaaacgtaaggaagagctcatcgagttgctggaacaagggagcagtgatgcttcacgatggcgcaagcgaaaacctcatgtccccctcaggataatgggaggggaaatgcaaaaaatcgtgttcaagattcccatggtggacgataagagccgtacaaaagcaatgtcattggttgcaagtacggttggagtgcactcggttgcaatcgccggtgacctaagagacgaggttgtggtggtcggtgatggcattgactccatcaatctggtctctgcgctccggaagaaggtgggccatgcggagttgctgcaggtcagccaagtaaaggaagatgtgaaggagataacggcgatgcttgcgccggtgaaatccatatgtgaatttcacgaggtcaaaacaatttgcatccttggattgccagggggaggcaaaacaacgattgcccgagtactatatcatgcattgggaacgcagttccaatgccgggttttcgcatcaatctctccaagttccagccccagtcccaatctaacagagactcttgcagacattttcgctcaagcacaactaggagtaactgatacacttagcacaccatatggtgggagtgggaccgggagagctcttcaacaacatctcatcgacaacatatcagctttcctcctcaacaaaaagtatctcattgtaatcgatgacatttggcattgggaagaatgggaagtcatcagaaagtccattcccaagaatgatctgggtggtagaataatcatgactactcgtcttaattcaatagctgagaagtgccacactgatgacaatgatgtttttgtctacgaagttggggatctagataataatgatgctttgtcgttgtcttgggggatagcaacaaagtctggggcaggcaacaggatcggaactggagaggataattcatgctatgatattgtgaacatgtgttatggtatgcctttagcacttatttggctgtcgtcagcattggttggagagatagaagaattaggtggtgctgaagtgaaaaaatgtagggatttgagacacatagaggatggtattttggacatcccatccttacaaccattggcggagagtttatgccttggttataaccatcttcctctttatctgaggactttgttgttgtactgtagtgcataccattggtctaacagaatcgaaaggggtcgtctggtcaggaggtggattgcggaaggatttgtgtcggaagagaaagaagcagaaggttactttggcgagcttattaacagaggatggattacgcagcacggagacaacaacagttataattactatgagatccaccccgtgatgctggccttcctgagatgcaagtccaaggagtacaattttttaacatgcttgggtctgggatctgatactagtactagtgcatcctccccaaggttgattcgccggctgtctcttcagggggggtatccagtggactgcttgtcaagcatgagtatggatgtgtcacacacttgcagccttgtcgtccttggtgacgtggcgcgacccaagggaatccccttctatatgtttaagcgcttgcgagtgttggaccttgaagataataaggatatacaggattctcatctgcagggcatatgtgaacagttaagcctcagagtgaggtaccttggtctcaagggaacgcggatccgaaagctccctcaggagatgaggaagctgaagcatttggagattttgtatgtggggagcactcggatcagtgaacttccgcaagagattggagagctgaagcatctgcggattctggacgtgagaaacacggacatcactgagctcccactgcagatacgggagctgcagcatctgcacactctggacgtgaggaacactccaatcagtgagctcccgccgcaggttggcaagctgcagaatctcaagattatgtgcgtgaggagcactggggttagggagctcccaaaggagattggggagctgaatcatctacagactctggacgtgagaaacacgagggtgagagagctgccatggcaagctggccagatctcccaatcgttgcgcgtgcttgccggtgacagtggcgatggcgtgcggttgcccgaaggcgtctgcgaagctctgatcaacggtattccaggggctacgcgtgcaaaatgcagggaggttctgtccatcgcgatcatcgatcgtttcggacctccccttgttgggatattcaaagttcccggcagtcatatgcgtatcccgaagatgatcaaagaccacttccgcgttctttcttgcctagacatcaggctctgccacaagcttgaggatgatgaccaaaagttcctcgccgagatgcccaacctgcagacgctcgtgctgaggttcgaggccctaccaagacaacccataaccatcaacggcacaggcttccagatgctggagagcttccgtgtcgacagccggttgccaaggatagccttccatgaagacgccatgcccaacctcaagcttctcgagttcaagttctacgccggcccagcaagcaacgatgccatcggcatcaccaacctgaagagcctccaaaaggtggtctttcggtgctcgccatggtacaagagcgacgcccctggcatcagcgccaccattgacgtcgtgaagaaagaagccgaggagcatcccaaccggccgatcaccctcctcatcaatgctgggtataaggagatatcaactgagtcacacgggagcagtgaaaacattgcgggcagcagtgggatcgatactgagcctgcacaggcacagcatgataatctccctgctgttcgagatgactacaagggaaaagggattcttcttgatggcaggtgtcctacctgcggccgagcgactaaaattgaagaggaaacccaagatcgagtagcagatattgaaattcaaacagaaactactagctag

SEQ ID NO: 167 - protein, 1143 aa, Oryza sativa
MEAAAMAVTAATGALAPVLVKLAALLDDGECNLLEGSRSDAEFIRSELEAVHSLLTPNILGRMGDDDAACKDGLIAEVRELSYDLDDAVDDFLELNFEQRRSASPFGELKARVEERVSNRFSDWKLPAASLPPSSVHRRAGLPPPDAGLVGMHKRKEELIELLEQGSSDASRWRKRKPHVPLRIMGGEMQKIVFKIPMVDDKSRTKAMSLVASTVGVHSVAIAGDLRDEVVVVGDGIDSINLVSALRKKVGHAELLQVSQVKEDVKEITAMLAPVKSICEFHEVKTICILGLPGGGKTTIARVLYHALGTQFQCRVFASISPSSSPSPNLTETLADIFAQAQLGVTDTLSTPYGGSGTGRALQQHLIDNISAFLLNKKYLIVIDDIWHWEEWEVIRKSIPKNDLGGRIIMTTRLNSIAEKCHTDDNDVFVYEVGDLDNNDALSLSWGIATKSGAGNRIGTGEDNSCYDIVNMCYGMPLALIWLSSALVGEIEELGGAEVKKCRDLRHIEDGILDIPSLQPLAESLCLGYNHLPLYLRTLLLYCSAYHWSNRIERGRLVRRWIAEGFVSEEKEAEGYFGELINRGWITQHGDNNSYNYYEIHPVMLAFLRCKSKEYNFLTCLGLGSDTSTSASSPRLIRRLSLQGGYPVDCLSSMSMDVSHTCSLVVLGDVARPKGIPFYMFKRLRVLDLEDNKDIQDSHLQGICEQLSLRVRYLGLKGTRIRKLPQEMRKLKHLEILYVGSTRISELPQEIGELKHLRILDVRNTDITELPLQIRELQHLHTLDVRNTPISELPPQVGKLQNLKIMCVRSTGVRELPKEIGELNHLQTLDVRNTRVRELPWQAGQISQSLRVLAGDSGDGVRLPEGVCEALINGIPGATRAKCREVLSIAIIDRFGPPLVGIFKVPGSHMRIPKMIKDHFRVLSCLDIRLCHKLEDDDQKFLAEMPNLQTLVLRFEALPRQPITINGTGFQMLESFRVDSRLPRIAFHEDAMPNLKLLEFKFYAGPASNDAIGITNLKSLQKVVFRCSPWYKSDAPGISATIDVVKKEAEEHPNRPITLLINAGYKEISTESHGSSENIAGSSGIDTEPAQAQHDNLPAVRDDYKGKGILLDGRCPTCGRATKIEEETQDRVADIEIQTETTS

SEQ ID NO: 168 - DNA, 6317 bp, Oryza sativa
atggaggcggctgccatggccgtaaccgcagccacgggggccttggcgcccgtgctagtgaagctggccgctttgctggacgacggggagtgcaatcttctggaggggagccggagcgacgcagagttcatcagatccgagctggaggccgtgcactctctcctcaccccaaatatcttggggaggatgggggatgacgatgcggcgtgcaaggatggcttgattgcggaggtccgggagctgtcctacgacctggatgatgccgtcgacgacttcttggagctcaatttcgagcagcgaagaagcgcaagccctttcggtgagctcaaggcaagagttgaggagcgtgtctccaatcgcttctctgactggaagctaccggcggcgagccttccgccgtcgtcggtacaccgtcgagctggcttgccgccaccagatgcagggctggtggggatgcacaaacgtaaggaagagctcatcgagttgctggaacaagggagcagtgatgcttcacgatggcgcaagcgaaaacctcatgtccccctcaggataatgggaggggaaatggtaccggtggatctcgattcctcacaaatagcttcgcttccttggatggcgctgccaataaatttgtttactttttctcttgattcttcaacttggaagtacttcattttttgttgcagcaaaaaatcgtgttcaagattcccatggtggacgataagagccgtacaaaagcaatgtcattggttgcaagtacggttggagtgcactcggttgcaatcgccggtgacctaagagacgaggttgtggtggtcggtgatggcattgactccatcaatctggtctctgcgctccggaagaaggtgggccatgcggagttgctgcaggtcagccaagtaaaggaagatgtgaaggagataacggcgatgcttgcgccggtgaaatccatatgtgaatttcacgaggtcaaaacaatttgcatccttggattgccagggggaggcaaaacaacgattgcccgagtactatatcatgcattgggaacgcagttccaatgccgggttttcgcatcaatctctccaagttccagccccagtcccaatctaacagagactcttgcagacattttcgctcaagcacaactaggagtaactgatacacttagcacaccatatggtgggagtgggaccgggagagctcttcaacaacatctcatcgacaacatatcagctttcctcctcaacaaaaagtaagcaatatcttatatctcttatctagcttgtccttaatccggcttcccaaattaaagtgaacaggctaaatgtccatataatgttgggttttttttttctgtcctcgatgaggtatatatcaagatatgccaaactttttttaattagcgttactttattctacctagtaaatagatacagaaatggggcaggcccctcctttgtgacaggccaatggttttatgatgtggaaacaactcccttatcactgaagctcttgctattactcgtgatggtactgatcttgcaaaggcttgcagtatttgtaaatccacagggagtggtcatcttttttttttaagataatgaatagaaatctggcctctatatagaaagccaaaggttacacaagtgcatacactccaaatctcaaagctgagaaacacgaaaaacaaacgaccaaaaagaaaagacgataagattaagtttcaagcttttcctccttgcttcagaaaacagggaaatgcagagctagcccgctcttcccctgccatgccctctcactgccattgcaactaccacaaaagctcccctgtttcgccgtgagcgaagggaggggatggaactagtctgctgctttgttgtcgccaagcactggtttcatgctgcccaaacaacctatgccccgctagcgataacgagtctgttgccgccatgctgttgtcgctggagagcacttgtcgctgctcagctatgtgttaagtaagctactaacaatctctccattctcttgtagactgcttataaaagattgtacttcaactttttattaatgaaatagagttcctgccttacaacaacaagaacgagagagagagagagagccaatatcatgagttagcactgtgaagacttcctgactgttatgtcttcaagaacagtataaaagcatttgccactataaaaatatgatagccctcaagatcattaaaaatatgtcatgttcttttaccttcataacaaccagtatcacaaatatgaaaacatttaaaggaaaatcagtatttgccatttatgtaaagaaaaactagactagaactctgggcttttattttagtgcacactgtatacatgtgtgttctttgacgtatatacttgatattttttcaaaaacttttgggggcatatctgtaacccatgccccatgcatccaaagtagtagtgagacaactttcgtatcaatggacatgtggcattaaatttaatcccaatatttgttctctcgaagtcggaacatataattggacaaaattatataatttaattagccaattgagccatatatacacacactataagaaacttctacaaaacaaacattcgctccttttaggttttgaccagtctatacatgaaccagccaacggtgtgctggtctgactataaatgtttttttagagagtaaaggcaccttccagtacctctctcgaggatagtaaaaacacccatgctttaaggttatgaacaacaaagcatagaacaaccacaagaaaaaaaaaacaactagaacaagttctggaactagttagggattcgggaagccattgcttgctggcttgggacaagctatgcctgccattggactatggtggagactgggcataaaggatctcaatctcttggagattggcctatgtcctaggtggccatggctgactgcaaggagatatatttcttgcaacggaaattttcattgcaaaagctgaaaatcgttgcgatatgtacctattgtgacataattgaatccattgggagccgtagcaataaatcccgtggtaataggctattgcaatgattttccgatggttgcataaaaaggtgctattacaatggttttgcatgctattgcaacaacttgatatgtcataggtatttattgcaacagtttgtaccatgctgcaataagatttcgcaacacagacctattcattaaatagcctatttccacacattcatttttgtggcaataattcagtgcgacaagcatgttctatagctataacctgatgcaacgggttagacttgttgcagtaacttattagcacatttaattttttactaaatttatattgattcaactatttcaacatcattcaatacagtaaatactggaaaatgcaagcaatctccaaaaattcaccaataagagaaacgaattaaatcatatacacaattatttcacaccgtacagtgcacttaagtgtaggaaatataatgctatatacatttccaaccctcaatacaggttctgtaaataatgaaaagaaacatcaatttgatttcttgaccggtccctctgagacacacagtgctttcctcagcaacatcgttgccgatctatgtaacttgtaaactccttgtgcttaataaattctggccagggttacttcagcctgcatggcgaaaaaaaagaacttgttagggagatcgcaaacaaatgttagctgccccatttcttctctactgaccataaaagctctaggatcaggtcatgaaaacaatgccgtcagaccggaaatactcaagattcagaacacgactcctaggaactgcaagtttaaatttcaacaaaagcaaaatacaaccagatgacaaactaatatatatcagctgactgttcatctcaagtggactcacatctgtgaaattgttagttctatgcatatatgctaatgtaatactaatatgctattgaggcttattactcttctcgacttttataggtatctcattgtaatcgatgacatttggcattgggaagaatgggaagtcatcagaaagtccattcccaagaatgatctgggtggtagaataatcatgactactcgtcttaattcaatagctgagaagtgccacactgatgacaatgatgtttttgtctacgaagttggggatctagataataatgatgctttgtcgttgtcttgggggatagcaacaaagtctggggcaggcaacaggatcggaactggagaggataattcatgctatgatattgtgaacatgtgttatggtatgcctttagcacttatttggctgtcgtcagcattggttggagagatagaagaattaggtggtgctgaagtgaaaaaatgtagggatttgagacacatagaggatggtattttggacatcccatccttacaaccattggcggagagtttatgccttggttataaccatcttcctctttatctgaggactttgttgttgtactgtagtgcataccattggtctaacagaatcgaaaggggtcgtctggtcaggaggtggattgcggaaggatttgtgtcggaagagaaagaagcagaaggttactttggcgagcttattaacagaggatggattacgcagcacggagacaacaacagttataattactatgagatccaccccgtgatgctggccttcctgagatgcaagtccaaggagtacaattttttaacatgcttgggtctgggatctgatactagtactagtgcatcctccccaaggttgattcgccggctgtctcttcagggggggtatccagtggactgcttgtcaagcatgagtatggatgtgtcacacacttgcagccttgtcgtccttggtgacgtggcgcgacccaagggaatccccttctatatgtttaagcgcttgcgagtgttggaccttgaagataataaggatatacaggattctcatctgcagggcatatgtgaacagttaagcctcagagtgaggtaccttggtctcaagggaacgcggatccgaaagctccctcaggagatgaggaagctgaagcatttggagattttgtatgtggggagcactcggatcagtgaacttccgcaagagattggagagctgaagcatctgcggattctggacgtgagaaacacggacatcactgagctcccactgcagatacgggagctgcagcatctgcacactctggacgtgaggaacactccaatcagtgagctcccgccgcaggttggcaagctgcagaatctcaagattatgtgcgtgaggagcactggggttagggagctcccaaaggagattggggagctgaatcatctacagactctggacgtgagaaacacgagggtgagagagctgccatggcaagctggccagatctcccaatcgttgcgcgtgcttgccggtgacagtggcgatggcgtgcggttgcccgaaggcgtctgcgaagctctgatcaacggtattccaggggctacgcgtgcaaaatgcagggaggttctgtccatcgcgatcatcgatcgtttcggacctccccttgttgggatattcaaagttcccggcagtcatatgcgtatcccgaagatgatcaaagaccacttccgcgttctttcttgcctagacatcaggctctgccacaagcttgaggatgatgaccaaaagttcctcgccgagatgcccaacctgcagacgctcgtgctgaggttcgaggccctaccaagacaacccataaccatcaacggcacaggcttccagatgctggagagcttccgtgtcgacagccggttgccaaggatagccttccatgaagacgccatgcccaacctcaagcttctcgagttcaagttctacgccggcccagcaagcaacgatgccatcggcatcaccaacctgaagagcctccaaaaggtggtctttcggtgctcgccatggtacaagagcgacgcccctggcatcagcgccaccattgacgtcgtgaagaaagaagccgaggagcatcccaaccggccgatcaccctcctcatcaatgctgggtataaggagatatcaactgagtcacacgggagcagtgaaaacattgcgggcagcagtgggatcgatactgagcctgcacaggcacagcatgataatctccctgctgttcgagatgactacaagggaaaagggattcttcttgatggcaggtgtcctacctgcggccgagcgactaaaattgaagaggaaacccaagatcgagtagcagatattgaaattcaaacagaaactactagctag

SEQ ID NO: 169 - DNA, 3066 bp, Artificial Sequence
  cDNA
atggagttggtggtaggtgcttccgaagccaccatgaaatctctcttgggcaagctgggcaatcttctagcccaggagtatgctctcatcagcggtatccgtggtgacatccagtacatcaatgacgagcttgccagcatgcaggccttcctccgtgatctcagcaacgtgccagagggtcacagtcatggccaccggatgaaggactggatgaagcagatccgagacatcgcctatgatgttgaggactgtatcgatgactttgcccaccgcctccctcaggattccatcagcgatgccaaatggtccttcctactcacaaaaatctatgaactatggacatggtggccacgtcgtgtgattgcttccaacattgcccaactcaaggtacgggcacaacagatcgcagatcgacgtagtagatacggagtgaacaacccagaacaccttgacagtagcagcagtgccaggacccgtgctgtcaattacgaaattgctgagtatcaggtcacaagccctcagatcattggtataaaggagcctgtggggatgaagacggtcatggaggagcttgaggtttggttaactaatcctcaagctgaaaatgggcaagctgttctgtccatagtcggttttggaggtgtgggaaagactaccattgccacagcattgtacagaaaagtcagtgaaaaatttcagtgccgggcatcagtagctgtgtctcagaactatgaccaaggcaaagtcctcaatagtattctgagtcaagtcagcaatcaggagcagggcagcagcacaacaattagtgagaaaaagaacctcacctcaggcgctaagagcatgttgaagacagccctgtcactgctcagaggtaattgtatatgtcagccagaaaatgatggaaaccctgataatacaccaatcaggctgcaggaaacaacggacgatgatcaaaaccccagaaaactggaacagctcctggccgaaaagagttatatcctcttgattgatgacatttggtctgccgaaacatgggagagtatcagatcgattttgcctaaaaataataaaggcggtagaataatagtgactacaagatttcaagctgttggttcaacatgctcccctcttgaaactgatcgtttgcatacagttgattttctcaccgatgacgagtcccaaaacttattcaatacaagtatttgtgaatcaaagataagaaaagatagcaacaaagtagacgagcaagtccctgaggaaatatggaaaatatgtgggggattgcctttggccatagtcagcatggctggtcttgtcgcctgcaacccaaggaaagcctgctgcgattggagtaaactttgcaaatcattatttccagagcaagaaactcctcttaccctcgatggtgttacaaggatactggattgttgttacaatgatttgcctgcggatctgaagacttgcttattgtacttgagtatatttccgaagggttggaaaattagtaggaaacgtttgtcccggcgatggatagctgaaggttttgctaatgagaagcaagggttaacccaggaaagagttgcagaggcatactttaatcaactcacaagaaggaacttagtacgtcccatggagcatggcagcaatgggaaggtaaaaacgtttcaagttcatgacatggttcttgaatacatcatgtccaaatcaatcgaagagaattttattactgtggttggtggacactggcagatgactgcaccaagcaataaagtccgtcgactgtcgatgcaaagcagtggatccaatcgtggaagttcaacaaaaggcctgaacttggctcaagtgagatcactgacggtgtttgggaacctgaaccatgtgccattccattcattcaactatgggataatacaggtgctggatcttgaggactggaagggtttgaaagagagacatatgacggagatatgtcaaatgcttttactcaagtatttgagcatccgacgaacagaaatttccaaaattccctccaagattcagaaacttgagtacttggaaactcttgacataagggagacatatgtcagggacctgcctaagtcaatagtccagctaaaacggatcattagcatacttggagggaataaaaacacacggaaggggctgaggttgcctcaagaaaaaagtaagaagccaattaaaaacccgtcgcctcaaggaaaaacaaaggagcccgcaaagaaaggattcttatcccaagaaaaaggtaaaggcgcaatgaaagcactccgtgtactgtcagggattgagattgttgaggaatcatcagaagtagctgcaggccttcatcagttgacagggctaaggaagcttgccatatacaagctcaatataacaaagggtggtgataccttcaaacaattacagtcctccattgagtaccttggcagctgtggtctgcagactctggccatcaatgatgagaattctgaatttatcaactcactgggcgacatgcccgcgcctccaagatatcttgtcgcccttgagctgtctggcaagttggagaagctacccaagtggatcaccagcatcactactctcaacaagctaaccatatctgtaacagttcttaggactgaaactttggagatcctccacattttaccttcattgttttccctcaccttcgccttttcacttagtgcagcgaagcaggatcaggacataataaaggacatccttgagaataataaattggacagtgatggggaaatcgtcattccagctgaaggattcaagagtcttaagctgcttcgcttctttgcacctttagtgccgaagctcagctttttggacaagaatgcaatgccagcactcgaaatcattgaaatgcggtttaaagacttcgaaggtctatttggcatcgaaatccttgaaaatctccgtgaggtgcatctcaaagttagtgatggggcagaagcaataaccaagttccttgtaaatgatttgaaggttaatactgagaaaccaaaagtatttgttgatggcatcgtcactgcatga

SEQ ID NO: 170 - protein, 1021 aa, Oryza sativa
MELVVGASEATMKSLLGKLGNLLAQEYALISGIRGDIQYINDELASMQAFLRDLSNVPEGHSHGHRMKDWMKQIRDIAYDVEDCIDDFAHRLPQDSISDAKWSFLLTKIYELWTWWPRRVIASNIAQLKVRAQQIADRRSRYGVNNPEHLDSSSSARTRAVNYEIAEYQVTSPQIIGIKEPVGMKTVMEELEVWLTNPQAENGQAVLSIVGFGGVGKTTIATALYRKVSEKFQCRASVAVSQNYDQGKVLNSILSQVSNQEQGSSTTISEKKNLTSGAKSMLKTALSLLRGNCICQPENDGNPDNTPIRLQETTDDDQNPRKLEQLLAEKSYILLIDDIWSAETWESIRSILPKNNKGGRIIVTTRFQAVGSTCSPLETDRLHTVDFLTDDESQNLFNTSICESKIRKDSNKVDEQVPEEIWKICGGLPLAIVSMAGLVACNPRKACCDWSKLCKSLFPEQETPLTLDGVTRILDCCYNDLPADLKTCLLYLSIFPKGWKISRKRLSRRWIAEGFANEKQGLTQERVAEAYFNQLTRRNLVRPMEHGSNGKVKTFQVHDMVLEYIMSKSIEENFITVVGGHWQMTAPSNKVRRLSMQSSGSNRGSSTKGLNLAQVRSLTVFGNLNHVPFHSFNYGIIQVLDLEDWKGLKERHMTEICQMLLLKYLSIRRTEISKIPSKIQKLEYLETLDIRETYVRDLPKSIVQLKRIISILGGNKNTRKGLRLPQEKSKKPIKNPSPQGKTKEPAKKGFLSQEKGKGAMKALRVLSGIEIVEESSEVAAGLHQLTGLRKLAIYKLNITKGGDTFKQLQSSIEYLGSCGLQTLAINDENSEFINSLGDMPAPPRYLVALELSGKLEKLPKWITSITTLNKLTISVTVLRTETLEILHILPSLFSLTFAFSLSAAKQDQDIIKDILENNKLDSDGEIVIPAEGFKSLKLLRFFAPLVPKLSFLDKNAMPALEIIEMRFKDFEGLFGIEILENLREVHLKVSDGAEAITKFLVNDLKVNTEKPKVFVDGIVTA

SEQ ID NO: 171 - DNA, 3229 bp, Oryza sativa
atggagttggtggtaggtgcttccgaagccaccatgaaatctctcttgggcaagctgggcaatcttctagcccaggagtatgctctcatcagcggtatccgtggtgacatccagtacatcaatgacgagcttgccagcatgcaggccttcctccgtgatctcagcaacgtgccagagggtcacagtcatggccaccggatgaaggactggatgaagcagatccgagacatcgcctatgatgttgaggactgtatcgatgactttgcccaccgcctccctcaggattccatcagcgatgccaaatggtccttcctactcacaaaaatctatgaactatggacatggtggccacgtcgtgtgattgcttccaacattgcccaactcaaggtacgggcacaacagatcgcagatcgacgtagtagatacggagtgaacaacccagaacaccttgacagtagcagcagtgccaggacccgtgctgtcaattacgaaattgctgagtatcaggtcacaagccctcagatcattggtataaaggagcctgtggggatgaagacggtcatggaggagcttgaggtttggttaactaatcctcaagctgaaaatgggcaagctgttctgtccatagtcggttttggaggtgtgggaaagactaccattgccacagcattgtacagaaaagtcagtgaaaaatttcagtgccgggcatcagtagctgtgtctcagaactatgaccaaggcaaagtcctcaatagtattctgagtcaagtcagcaatcaggagcagggcagcagcacaacaattagtgagaaaaagaacctcacctcaggcgctaagagcatgttgaagacagccctgtcactgctcagaggtaattgtatatgtcagccagaaaatgatggaaaccctgataatacaccaatcaggctgcaggaaacaacggacgatgatcaaaaccccagaaaactggaacagctcctggccgaaaagaggtacctttttttgtaaataaaattgctttgcttatctgtaaattaacttactcatcccactctaaatctaatgtttatttccttctatacacagcacaactccatcttttgaatgggttttatttttctcacttgtgctcatttttttttatcatctctgcagttatatcctcttgattgatgacatttggtctgccgaaacatgggagagtatcagatcgattttgcctaaaaataataaaggcggtagaataatagtgactacaagatttcaagctgttggttcaacatgctcccctcttgaaactgatcgtttgcatacagttgattttctcaccgatgacgagtcccaaaacttattcaatacaagtatttgtgaatcaaagataagaaaagatagcaacaaagtagacgagcaagtccctgaggaaatatggaaaatatgtgggggattgcctttggccatagtcagcatggctggtcttgtcgcctgcaacccaaggaaagcctgctgcgattggagtaaactttgcaaatcattatttccagagcaagaaactcctcttaccctcgatggtgttacaaggatactggattgttgttacaatgatttgcctgcggatctgaagacttgcttattgtacttgagtatatttccgaagggttggaaaattagtaggaaacgtttgtcccggcgatggatagctgaaggttttgctaatgagaagcaagggttaacccaggaaagagttgcagaggcatactttaatcaactcacaagaaggaacttagtacgtcccatggagcatggcagcaatgggaaggtaaaaacgtttcaagttcatgacatggttcttgaatacatcatgtccaaatcaatcgaagagaattttattactgtggttggtggacactggcagatgactgcaccaagcaataaagtccgtcgactgtcgatgcaaagcagtggatccaatcgtggaagttcaacaaaaggcctgaacttggctcaagtgagatcactgacggtgtttgggaacctgaaccatgtgccattccattcattcaactatgggataatacaggtgctggatcttgaggactggaagggtttgaaagagagacatatgacggagatatgtcaaatgcttttactcaagtatttgagcatccgacgaacagaaatttccaaaattccctccaagattcagaaacttgagtacttggaaactcttgacataagggagacatatgtcagggacctgcctaagtcaatagtccagctaaaacggatcattagcatacttggagggaataaaaacacacggaaggggctgaggttgcctcaagaaaaaagtaagaagccaattaaaaacccgtcgcctcaaggaaaaacaaaggagcccgcaaagaaaggattcttatcccaagaaaaaggtaaaggcgcaatgaaagcactccgtgtactgtcagggattgagattgttgaggaatcatcagaagtagctgcaggccttcatcagttgacagggctaaggaagcttgccatatacaagctcaatataacaaagggtggtgataccttcaaacaattacagtcctccattgagtaccttggcagctgtggtctgcagactctggccatcaatgatgagaattctgaatttatcaactcactgggcgacatgcccgcgcctccaagatatcttgtcgcccttgagctgtctggcaagttggagaagctacccaagtggatcaccagcatcactactctcaacaagctaaccatatctgtaacagttcttaggactgaaactttggagatcctccacattttaccttcattgttttccctcaccttcgccttttcacttagtgcagcgaagcaggatcaggacataataaaggacatccttgagaataataaattggacagtgatggggaaatcgtcattccagctgaaggattcaagagtcttaagctgcttcgcttctttgcacctttagtgccgaagctcagctttttggacaagaatgcaatgccagcactcgaaatcattgaaatgcggtttaaagacttcgaaggtctatttggcatcgaaatccttgaaaatctccgtgaggtgcatctcaaagttagtgatggggcagaagcaataaccaagttccttgtaaatgatttgaaggttaatactgagaaaccaaaagtatttgttgatggcatcgtcactgcatga

SEQ ID NO: 172 - DNA, 3429 bp, Artificial Sequence
  cDNA
atggaggcggctgccatggccgtaaccgcagccacgggggccttggcgcccgtgctagtgaagctggccgctttgctggacgacggggagtgcaatcttctggaggggagccggagcgacgcagagttcatcagatccgagctggaggccgttcattctctcctcaccccaaatatcttggggaggatgggggatgacgatgcggcgtgcaaggatggcttgattgcggaggtccgggagctgtcctacgacctggatgatgccgtcgacgacttcttggagctcaatttcgagcagcgaagaagcgcaagccctttcggtgagctcaaggcaagagttgaggagcatgtctccaatcgcttctctgactggaagctaccggcggcgagccttccgccgtcgtcggtacaccgccgagctggcttgccgccaccagatgcagagctggtggggatggacaaacgtatggaagagctcaccaaattgctggaacaagggagcaatgatgcttcacgatggcgcaagcgaaaaccgcatttcccgctcagaaaaacagggctaaagcaaaaaatcgtgatcaaggttgccatggagggcaataattgccgttcaaaagcaatggctttagttgcgagcactggaggagtggactcggttgcgctcgtaggtgatctaagagacaagatagaggtggtcggttatggcattgaccccatcaagctgatctccgcgctccggaagaaggtgggcgatgcggagttgctgcaggtcagccaagcaaagaaagatgtgaaggagacgacgccgatgcttgcgccggtgaaatccatatgtgaatttcacaaggtcaaaacagtttgcatccttggattgccaggtggaggcaaaacaacggttgccagagaattatatgacgccttgggaacgcacttcccatgccgggttttcgtgtcagtctctccaagttctagtcccagtcccaatctcacaaagactcttgcagacattttcgctcaagcacaactaggagtaactgatacacttagcacaccatatggtgggagtgggaccgggagagctcttcaacaacatctcatcgacaacatatcagctttcctcctcaacaaaaagtatctcattgtaatcgatgacatttggcattgggaagaatgggaagtcatcagaaagtccattcccaagaatgatctgggtggtagaataatcatgactactcgtcttaattcaatagctgagaagtgccacactgatgacaatgatgtttttgtctacgaagttggggatctagataataatgatgctttgtcgttgtcttgggggatagcaacaaagtctggggcaggcaacaggatcggaactggagaggataatccatgctatgatattgtgaacatgtgttatggtatgcctttagcacttatttggctgtcgtcagcattggttggagagatagaagaattaggtggtgctgaagtgaaaaaatgtagggatttgagacacatagaggatggtattttggacatcccatccttacaaccattggcggagagtttatgccttggttataaccatcttcctctttatctgaggactttgttgttgtactgtagtgcataccattggtctaacagaatcgaaaggggtcgtctggtcaggaggtggattgcggaaggatttgtgtcggaagagaaagaagcagaaggttactttggcgagcttattaacagaggatggattacgcagcacggagacaacaacagttataattactatgagatccaccccgtgatgctggccttcctgagatgcaagtccaaggagtacaattttttaacatgcttgggtctgggatctgatactagtactagtgcatcctccccaaggttgattcgccggctgtctcttcagggggggtatccagtggactgcttgtcaagcatgagtatggatgtgtcacacacttgcagccttgtcgtccttggtgacgtggcgcgacccaagggaatccccttctatatgtttaagcgcttgcgagtgttggaccttgaagataataaggatatacaggattctcatctgcagggcatatgtgaacagttaagcctcagagtgaggtaccttggtctcaagggaacgcggatccgaaagctccctcaggagatgaggaagctgaagcatttggagattttgtatgtggggagcactcggatcagtgaacttccgcaagagattggagagctgaagcatctgcggattctggacgtgagaaacacggacatcactgagctcccactgcagatacgggagctgcagcatctgcacactctggacgtgaggaacactccaatcagtgagctcccgccgcaggttggcaagctgcagaatctcaagattatgtgcgtgaggagcactggggttagggagctcccaaaggagattggggagctgaatcatctacagactctggacgtgagaaacacgagggtgagagagctgccatggcaagctggccagatctcccaatcgttgcgcgtgcttgccggtgacagtggcgatggcgtgcggttgcccgaaggcgtctgcgaagctctgatcaacggtattccaggggctacgcgtgcaaaatgcagggaggttctgtccatcgcgatcatcgatcgtttcggacctccccttgttgggatattcaaagttcccggcagtcatatgcgtatcccgaagatgatcaaagaccacttccgcgttctttcttgcctagacatcaggctctgccacaagcttgaggatgatgaccaaaagttcctcgccgagatgcccaacctgcagacgctcgtgctgaggttcgaggccctaccaagacaacccataaccatcaacggcacaggcttccagatgctggagagcttccgtgtcgacagccgggtgccaaggatagccttccatgaagacgccatgcccaacctcaagcttctcgagttcaagttctacgccggcccagcaagcaacgatgccatcggcatcaccaacctgaagagcctccaaaaggtggtctttcggtgctcgccatggtacaagagcgacgcccctggcatcagcgccaccattgacgtcgtgaagaaagaagccgaggagcatcccaaccggccgatcaccctcctcatcaatgctgggtataaggagatatcaactgagtcacacgggagcagtgaaaacattgcgggcagcagtgggatcgatactgagcctgcacaggcacagcatgataatctccctgctgttcgagatgactacaagggaaaagggattcttcttgatggcaggtgtcctacctgcggccgagcgactaaaattgaagaggaaacccaagatcgagtagcagatattgaaattcaaacagaaactactagctag

SEQ ID NO: 173 - protein, 1142 aa, Oryza sativa
MEAAAMAVTAATGALAPVLVKLAALLDDGECNLLEGSRSDAEFIRSELEAVHSLLTPNILGRMGDDDAACKDGLIAEVRELSYDLDDAVDDFLELNFEQRRSASPFGELKARVEEHVSNRFSDWKLPAASLPPSSVHRRAGLPPPDAELVGMDKRMEELTKLLEQGSNDASRWRKRKPHFPLRKTGLKQKIVIKVAMEGNNCRSKAMALVASTGGVDSVALVGDLRDKIEVVGYGIDPIKLISALRKKVGDAELLQVSQAKKDVKETTPMLAPVKSICEFHKVKTVCILGLPGGGKTTVARELYDALGTHFPCRVFVSVSPSSSPSPNLTKTLADIFAQAQLGVTDTLSTPYGGSGTGRALQQHLIDNISAFLLNKKYLIVIDDIWHWEEWEVIRKSIPKNDLGGRIIMTTRLNSIAEKCHTDDNDVFVYEVGDLDNNDALSLSWGIATKSGAGNRIGTGEDNPCYDIVNMCYGMPLALIWLSSALVGEIEELGGAEVKKCRDLRHIEDGILDIPSLQPLAESLCLGYNHLPLYLRTLLLYCSAYHWSNRIERGRLVRRWIAEGFVSEEKEAEGYFGELINRGWITQHGDNNSYNYYEIHPVMLAFLRCKSKEYNFLTCLGLGSDTSTSASSPRLIRRLSLQGGYPVDCLSSMSMDVSHTCSLVVLGDVARPKGIPFYMFKRLRVLDLEDNKDIQDSHLQGICEQLSLRVRYLGLKGTRIRKLPQEMRKLKHLEILYVGSTRISELPQEIGELKHLRILDVRNTDITELPLQIRELQHLHTLDVRNTPISELPPQVGKLQNLKIMCVRSTGVRELPKEIGELNHLQTLDVRNTRVRELPWQAGQISQSLRVLAGDSGDGVRLPEGVCEALINGIPGATRAKCREVLSIAIIDRFGPPLVGIFKVPGSHMRIPKMIKDHFRVLSCLDIRLCHKLEDDDQKFLAEMPNLQTLVLRFEALPRQPITINGTGFQMLESFRVDSRVPRIAFHEDAMPNLKLLEFKFYAGPASNDAIGITNLKSLQKVVFRCSPWYKSDAPGISATIDVVKKEAEEHPNRPITLLINAGYKEISTESHGSSENIAGSSGIDTEPAQAQHDNLPAVRDDYKGKGILLDGRCPTCGRATKIEEETQDRVADIEIQTETTS

SEQ ID NO: 174 - DNA, 6348 bp, Oryza sativa
atggaggcggctgccatggccgtaaccgcagccacgggggccttggcgcccgtgctagtgaagctggccgctttgctggacgacggggagtgcaatcttctggaggggagccggagcgacgcagagttcatcagatccgagctggaggccgttcattctctcctcaccccaaatatcttggggaggatgggggatgacgatgcggcgtgcaaggatggcttgattgcggaggtccgggagctgtcctacgacctggatgatgccgtcgacgacttcttggagctcaatttcgagcagcgaagaagcgcaagccctttcggtgagctcaaggcaagagttgaggagcatgtctccaatcgcttctctgactggaagctaccggcggcgagccttccgccgtcgtcggtacaccgccgagctggcttgccgccaccagatgcagagctggtggggatggacaaacgtatggaagagctcaccaaattgctggaacaagggagcaatgatgcttcacgatggcgcaagcgaaaaccgcatttcccgctcagaaaaacagggctaaaggtacggttggatctcgattcttcacaaatatagcttcctccgatagcagtgccaatgaatttgtttacttctctcttgattctttaatttggaagtactgtataacaaacatggagggatcgtcatttaacttaattttttttgttgcagcaaaaaatcgtgatcaaggttgccatggagggcaataattgccgttcaaaagcaatggctttagttgcgagcactggaggagtggactcggttgcgctcgtaggtgatctaagagacaagatagaggtggtcggttatggcattgaccccatcaagctgatctccgcgctccggaagaaggtgggcgatgcggagttgctgcaggtcagccaagcaaagaaagatgtgaaggagacgacgccgatgcttgcgccggtgaaatccatatgtgaatttcacaaggtcaaaacagtttgcatccttggattgccaggtggaggcaaaacaacggttgccagagaattatatgacgccttgggaacgcacttcccatgccgggttttcgtgtcagtctctccaagttctagtcccagtcccaatctcacaaagactcttgcagacattttcgctcaagcacaactaggagtaactgatacacttagcacaccatatggtgggagtgggaccgggagagctcttcaacaacatctcatcgacaacatatcagctttcctcctcaacaaaaagtaagcaatatcttatatctcttatctagcttgtccttaatccggcttcccaaattaaagtgaacaggctatatgtccatataatgttgggttttttttttctgtcctcgatgaggtatatatcaagatatgccaaactttttttaattagcgttactttattctacctagtaaatagatacagaaatggggcaggcccctcctttgtgacaggccaatggttttatgatgtggaaacaactcccttatcactgaagctcttgctattactcgtgatggtactgatcttgcaaaggcttgcagtatttgtaaatccacagggagtggtcatctttttttttttaagataatgaatagaaatctggcctctatatagaaagccaaaggttacacaagtgcatacactccaaatctcaaagctgagaaacacgaaaaacaaacgaccaaaaagaaaagacgataagattaagtttcaagcttttcctccttgcttcagaaaacagggaaatgcagagctagcccgctcttcccctgccatgccctctcactgccattgcaactaccacaaaagctcccctgtttcgccgtgagcgaagggaggggatggaactagtctgctgctttgttgtcgccaagcactggtttcatgctgcccaaacaacctatgccccgctagcgataacgagtctgttgccgccatgctgttgtcgctggagagcacttgtcgctgctcagctatgtgttaagtaagctactaacaatctctccattctcttgtagactgcttataaaagattgtacttcaactttttattaatgaaatagagttcctgccttacaacaacaagaacgagagagagagagagagccaatatcacgagttagcactgtgaagacttcctgactgttatgtcttcaagaacagtataaaagcatttgccactataaaaatatgatagccctcaagatcattaaaaatatgtcatgttcttttaccttcataacaaccagtatcacaaatatgaaaacatttaaaggaaaatcagtatttgccatttatgtaaagaaaaactagactagaactctgggcttttattttagtgcacactgtatacatgtgtgttctttgacgtatatacttgatattttttcaaaaacttttgggggcatatctgtaacccatgccccatgcatccaaagtagtagtgagacaactttcgtatcaatggacatgtggcattaaatttaatcccaatatttgttctctcgaagtcctgaacatataattggacaaaattatataatttaattaggccaattgagccatatatacacacactataagaaacttctacaaaacaaacattcgctccttttaggttttgaccagtctatacatgaaccagccaacggtgtgctggtctgactataaatgtttttttagagagtaaaggcaccttccagtacctctctcgaggacagtaaaaacacccatgctttaaggttatgaacaacaaagcatagaacaaccacaagaaaaaaaaacaactagaacaagttctggaactagttagggattcgggaagccattgcttgctggcttgggacaagctatgcctgccattggactatggtggagactgggcataaaggatctcaatctcttggagattggcctatgtcctaggtggccatggctgactgcaaggagatatatttcttgcaacggaaattttcattgcaaaagctgaaaatcgttgcgatatgtacctattgtgacataattgaatccattgggagccgtagcaataaatcccgtggtaataggctattgcaatgattttccgatggttgcataaaaaggtgctattacaatggttttgcattgctattgcaacaacttgatatgtcataggtatttattgcaacagtttgtaccatgctgcaataagatttcgcaacacagacctattcattaaatagcctatttccacacattcatttttgtggcaataattcagtgcgacaagcatgttctatagctataacctgatgcaacgggttagacttgttgcagtaacttattagcacatttaattttttactaaatttatattgattcaactatttcaacatcattcaatacagtaaatactggaaaatgcaagcaatctccaaaaattcaccaataagagaaacgaattaaatcatatacacaattatttcacaccgtacagtgcacttaagtgtaggaaatataatgctatatacatttccaaccctcaatacaggttctgtaaataatgaaaagaaacatcaatttgatttcttgaccggtccctctgagacacacagtgctttcctcagcaacatcgttgccgatctatgtaacttgtaaactccttgtgcttaataaattctggccagggttacttcagcctgcatggcgaaaaaaaagaacttgttagggagatggcaaacaaatgttagctgccccatttcttctctactgaccataaaagctctaggatcaggtcatgaaaacaatgccgtcagaccggaaatactcaagattcagaacacgactcctaggaactgcaagtttaaatttcaacaaaagcaaaatacaaccagatgacaaactaatatatatcagctgactgttcatctcaagtggactcacatctgtgaaattgttagttctatgcatatatgctaatgtaatactaatatgctattgaggcttattactcttctcgacttttataggtatctcattgtaatcgatgacatttggcattgggaagaatgggaagtcatcagaaagtccattcccaagaatgatctgggtggtagaataatcatgactactcgtcttaattcaatagctgagaagtgccacactgatgacaatgatgtttttgtctacgaagttggggatctagataataatgatgctttgtcgttgtcttgggggatagcaacaaagtctggggcaggcaacaggatcggaactggagaggataatccatgctatgatattgtgaacatgtgttatggtatgcctttagcacttatttggctgtcgtcagcattggttggagagatagaagaattaggtggtgctgaagtgaaaaaatgtagggatttgagacacatagaggatggtattttggacatcccatccttacaaccattggcggagagtttatgccttggttataaccatcttcctctttatctgaggactttgttgttgtactgtagtgcataccattggtctaacagaatcgaaaggggtcgtctggtcaggaggtggattgcggaaggatttgtgtcggaagagaaagaagcagaaggttactttggcgagcttattaacagaggatggattacgcagcacggagacaacaacagttataattactatgagatccaccccgtgatgctggccttcctgagatgcaagtccaaggagtacaattttttaacatgcttgggtctgggatctgatactagtactagtgcatcctccccaaggttgattcgccggctgtctcttcagggggggtatccagtggactgcttgtcaagcatgagtatggatgtgtcacacacttgcagccttgtcgtccttggtgacgtggcgcgacccaagggaatccccttctatatgtttaagcgcttgcgagtgttggaccttgaagataataaggatatacaggattctcatctgcagggcatatgtgaacagttaagcctcagagtgaggtaccttggtctcaagggaacgcggatccgaaagctccctcaggagatgaggaagctgaagcatttggagattttgtatgtggggagcactcggatcagtgaacttccgcaagagattggagagctgaagcatctgcggattctggacgtgagaaacacggacatcactgagctcccactgcagatacgggagctgcagcatctgcacactctggacgtgaggaacactccaatcagtgagctcccgccgcaggttggcaagctgcagaatctcaagattatgtgcgtgaggagcactggggttagggagctcccaaaggagattggggagctgaatcatctacagactctggacgtgagaaacacgagggtgagagagctgccatggcaagctggccagatctcccaatcgttgcgcgtgcttgccggtgacagtggcgatggcgtgcggttgcccgaaggcgtctgcgaagctctgatcaacggtattccaggggctacgcgtgcaaaatgcagggaggttctgtccatcgcgatcatcgatcgtttcggacctccccttgttgggatattcaaagttcccggcagtcatatgcgtatcccgaagatgatcaaagaccacttccgcgttctttcttgcctagacatcaggctctgccacaagcttgaggatgatgaccaaaagttcctcgccgagatgcccaacctgcagacgctcgtgctgaggttcgaggccctaccaagacaacccataaccatcaacggcacaggcttccagatgctggagagcttccgtgtcgacagccgggtgccaaggatagccttccatgaagacgccatgcccaacctcaagcttctcgagttcaagttctacgccggcccagcaagcaacgatgccatcggcatcaccaacctgaagagcctccaaaaggtggtctttcggtgctcgccatggtacaagagcgacgcccctggcatcagcgccaccattgacgtcgtgaagaaagaagccgaggagcatcccaaccggccgatcaccctcctcatcaatgctgggtataaggagatatcaactgagtcacacgggagcagtgaaaacattgcgggcagcagtgggatcgatactgagcctgcacaggcacagcatgataatctccctgctgttcgagatgactacaagggaaaagggattcttcttgatggcaggtgtcctacctgcggccgagcgactaaaattgaagaggaaacccaagatcgagtagcagatattgaaattcaaacagaaactactagctag

SEQ ID NO: 175 - DNA, 3066 bp, Artificial Sequence
  cDNA
atggagttggtggtaggtgcttccgaagccaccatgaaatctctcttgggcaagctgggcaatcttctagcccaggagtatgctctcatcagcggtatccgtggtgacatccagtacatcaatgacgagcttgccagcatgcaggccttcctccgtgatctcagcaacgtgccagagggtcacagtcatggccaccggatgaaggactggatgaagcagatccgagacatcgcctatgatgttgaggactgtatcgatgactttgcccaccgcctccctcaggattccatcagcgatgccaaatggtccttcctactcacaaaaatctatgaactatggacatggtggccacgtcgtgtgattgcttccaacattgcccaactcaaggtacgggcacaacagatcgcagatcgacgtagtagatacggagtgaacaacccagaacaccttgacagtagcagcagtgccaggacccgtgctgtcaattacgaaattgctgagtatcaggtcacaagccctcagatcattggtataaaggagcctgtggggatgaagacggtcatggaggagcttgaggtttggttaactaatcctcaagctgaaaatgggcaagctgttctgtccatagtcggttttggaggtgtgggaaagactaccattgccacagcattgtacagaaaagtcagtgataaatttcagtgccgggcatcagtagctgtgtctcagaactatgaccaaggcaaagtcctcaatagtattctgagtcaagtcagcaatcaggagcagggcagcagcacaacaattagtgagaaaaagaacctcacctcaggcgctaagagcatgttgaagacagccctgtcactgctcagaggtaattgtatatgtcagccagaaaatgatggaaaccctgataatacaccaatcaggctgcaggaaacaacggacgatgatcaaaaccccagaaaactggaacagctcctggccgaaaagagttatatcctcttgattgatgacatttggtctgccgaaacatgggagagtatcagatcgattttgcctaaaaataataaaggcggtagaataatagtgactacaagatttcaagctgttggttcaacatgctcccctcttgaaactgatcgtttgcatacagttgattttctcaccgatgacgagtcccaaaacttattcaatacaagtatttgtgaatcaaagataagaaaagatagcaacaaagtagacgagcaagtccctgaggaaatatggaaaatatgtgggggattgcctttggccatagtcaccatggctggtcttgtcgcctgcaacccaaggaaagcctgctgcgattggagtaaactttgcaaatcattatttccagagcaagaaactcctcttaccctcgatggtgttacaaggatactggattgttgttacaatgatttgcctgcggatctgaagacttgcttattgtacttgagtatatttccgaagggttggaaaattagtaggaaacgtttgtcccggcgatggatagctgaaggttttgctaatgagaagcaagggttaacccaggaaagagttgcagaggcatactttaatcaactcacaagaaggaacttagtacgtcccatggagcatggcagcaatgggaaggtaaaaacgtttcaagttcatgacatggttcttgaatacatcatgtccaaatcaatcgaagagaattttattactgtggttggtggacactggcagatgactgcaccaagcaataaagtccgtcgactgtcgatgcaaagcagtggatccaatcgtggaagttcaacaaaaggcctgaacttggctcaagtgagatcactgacggtgtttgggaacctgaaccatatgccattccattcattcaactatgggataatacaggtgctggatcttgaggactggaagggtttgaaagagagacatatgacggagatatgtcaaatgcttttactcaagtatttgagcatccgacgaacagaaatttccaaaattccctccaagattcagaaacttgagtacttggaaactcttgacataagggagacatatgtcagggacctgcctaagtcaatagtccagctaaaacggatcattagcatacttggagggaataaaaacacacggaaggggctgaggttgcctcaagaaaaaagtaagaagccaattaaaaacccgtcgcctcaaggaaaaacaaaggagcccgcaaagaaaggattcttatcccaagaaaaaggtaaaggcgcaatgaaagcactccgtgtactgtcagggattgagattgttgaggaatcatcagaagtagctgcaggccttcatcagttgacagggctaaggaagcttgccatatacaagctcaatataacaaagggtggtgataccttcaaacaattacagtcctccattgagtaccttggcagctgtggtctgcagactctggccatcaatgatgagaattctgaatttatcaactcactgggcgacatgcccgcgcctccaagatatcttgtcgcccttgagctgtctggcaagttggagaagctacccaagtggatcaccagcatcactactctcaacaagctaaccatatctgtaacagttcttaggactgaaactttggagatcctccacattttaccttcattgttttccctcaccttcgccttttcacttagtgcagcgaagcaggatcaggacataataaaggacatccttgagaataataaattggacagtgatggggaaatcgtcattccagctgaaggattcaagagtcttaagctgcttcgcttctttgcacctttagtgccgaagctcagctttttggacaagaatgcaatgccagcactcgaaatcattgaaatgcggtttaaagacttcgaaggtctatttggcatcgaaatccttgaaaatctccgtgaggtgcatctcaaagttagtgatggggcagaagcaataaccaagttccttgtaaatgatttgaaggttaatactgagaaaccaaaagtatttgttgatggcatcgtcactgcatga

SEQ ID NO: 176 - skipped

SEQ ID NO: 177 - DNA, 3230 bp, Oryza sativa
atggagttggtggtaggtgcttccgaagccaccatgaaatctctcttgggcaagctgggcaatcttctagcccaggagtatgctctcatcagcggtatccgtggtgacatccagtacatcaatgacgagcttgccagcatgcaggccttcctccgtgatctcagcaacgtgccagagggtcacagtcatggccaccggatgaaggactggatgaagcagatccgagacatcgcctatgatgttgaggactgtatcgatgactttgcccaccgcctccctcaggattccatcagcgatgccaaatggtccttcctactcacaaaaatctatgaactatggacatggtggccacgtcgtgtgattgcttccaacattgcccaactcaaggtacgggcacaacagatcgcagatcgacgtagtagatacggagtgaacaacccagaacaccttgacagtagcagcagtgccaggacccgtgctgtcaattacgaaattgctgagtatcaggtcacaagccctcagatcattggtataaaggagcctgtggggatgaagacggtcatggaggagcttgaggtttggttaactaatcctcaagctgaaaatgggcaagctgttctgtccatagtcggttttggaggtgtgggaaagactaccattgccacagcattgtacagaaaagtcagtgataaatttcagtgccgggcatcagtagctgtgtctcagaactatgaccaaggcaaagtcctcaatagtattctgagtcaagtcagcaatcaggagcagggcagcagcacaacaattagtgagaaaaagaacctcacctcaggcgctaagagcatgttgaagacagccctgtcactgctcagaggtaattgtatatgtcagccagaaaatgatggaaaccctgataatacaccaatcaggctgcaggaaacaacggacgatgatcaaaaccccagaaaactggaacagctcctggccgaaaagaggtacctttttttgtaaataaaattgctttgcttatctgtaaattaacttactcatcccactctaaatctaatgtttatttccttctatacacagcacaactccatcttttgaatgggttttatttttctcacttgtgctcattttttttttatcatctctgcagttatatcctcttgattgatgacatttggtctgccgaaacatgggagagtatcagatcgattttgcctaaaaataataaaggcggtagaataatagtgactacaagatttcaagctgttggttcaacatgctcccctcttgaaactgatcgtttgcatacagttgattttctcaccgatgacgagtcccaaaacttattcaatacaagtatttgtgaatcaaagataagaaaagatagcaacaaagtagacgagcaagtccctgaggaaatatggaaaatatgtgggggattgcctttggccatagtcaccatggctggtcttgtcgcctgcaacccaaggaaagcctgctgcgattggagtaaactttgcaaatcattatttccagagcaagaaactcctcttaccctcgatggtgttacaaggatactggattgttgttacaatgatttgcctgcggatctgaagacttgcttattgtacttgagtatatttccgaagggttggaaaattagtaggaaacgtttgtcccggcgatggatagctgaaggttttgctaatgagaagcaagggttaacccaggaaagagttgcagaggcatactttaatcaactcacaagaaggaacttagtacgtcccatggagcatggcagcaatgggaaggtaaaaacgtttcaagttcatgacatggttcttgaatacatcatgtccaaatcaatcgaagagaattttattactgtggttggtggacactggcagatgactgcaccaagcaataaagtccgtcgactgtcgatgcaaagcagtggatccaatcgtggaagttcaacaaaaggcctgaacttggctcaagtgagatcactgacggtgtttgggaacctgaaccatatgccattccattcattcaactatgggataatacaggtgctggatcttgaggactggaagggtttgaaagagagacatatgacggagatatgtcaaatgcttttactcaagtatttgagcatccgacgaacagaaatttccaaaattccctccaagattcagaaacttgagtacttggaaactcttgacataagggagacatatgtcagggacctgcctaagtcaatagtccagctaaaacggatcattagcatacttggagggaataaaaacacacggaaggggctgaggttgcctcaagaaaaaagtaagaagccaattaaaaacccgtcgcctcaaggaaaaacaaaggagcccgcaaagaaaggattcttatcccaagaaaaaggtaaaggcgcaatgaaagcactccgtgtactgtcagggattgagattgttgaggaatcatcagaagtagctgcaggccttcatcagttgacagggctaaggaagcttgccatatacaagctcaatataacaaagggtggtgataccttcaaacaattacagtcctccattgagtaccttggcagctgtggtctgcagactctggccatcaatgatgagaattctgaatttatcaactcactgggcgacatgcccgcgcctccaagatatcttgtcgcccttgagctgtctggcaagttggagaagctacccaagtggatcaccagcatcactactctcaacaagctaaccatatctgtaacagttcttaggactgaaactttggagatcctccacattttaccttcattgttttccctcaccttcgccttttcacttagtgcagcgaagcaggatcaggacataataaaggacatccttgagaataataaattggacagtgatggggaaatcgtcattccagctgaaggattcaagagtcttaagctgcttcgcttctttgcacctttagtgccgaagctcagctttttggacaagaatgcaatgccagcactcgaaatcattgaaatgcggtttaaagacttcgaaggtctatttggcatcgaaatccttgaaaatctccgtgaggtgcatctcaaagttagtgatggggcagaagcaataaccaagttccttgtaaatgatttgaaggttaatactgagaaaccaaaagtatttgttgatggcatcgtcactgcatga

SEQ ID NO: 178 - DNA, 3432 bp, Artificial Sequence
  cDNA
atggaggcggctgccatggccgtaaccgcagccacgggggccttggcgcccgtgctagtgaagctggccgctttgctggacgacggggagtgcaatcttctggaggggagccggagcgacgcagagttcatcagatccgagctggaggccgtgcactctctcctcaccccaaatatcttggggaggatgggggatgacgatgcggcgtgcaaggatggcttgattgcggaggtccgggagctgtcctacgacctggatgatgccgtcgacgacttcttggagctcaatttcgagcagcgaagaagcgcaagccctttcggtgagctcaaggcaagagttgaggagcgtgtctccaatcgcttctctgactggaagctaccggcggcgagccttccgccgtcgtcggtacaccgtcgagctggcttgccgccaccagatgcagggctggtggggatgcacaaacgtaaggaagagctcatcgagttgctggaacaagggagcagtgatgcttcacgatggcgcaagcgaaaacctcatgtccccctcaggataatgggaggggaaatgcaaaaaatcgtgttcaagattcccatggtggacgataagagccgtacaaaagcaatgtcattggttgcaagtacggttggagtgcactcggttgcaatcgccggtgacctaagagaccaggttgtggtggtcggtgatggcattgactccatcaatctggtctctgcgctccggaagaaggtgggccctgcgatgtttctggaggtcagccaagtaaaggaagatgtgaaggagataacggcgatgcttgcgccggtgaaatccatatgtgaatttcacgaggtcaaaacaatttgcatccttggattgccagggggaggcaaaacaacgattgcccgagtactatatcatgcattgggaacgcagttccaatgccgggttttcgcatcaatctctccaagttccagccccagtcccaatctaacagagactcttgcagacattttcgctcaagcacaactaggagtaactgatacacttagcacaccatatggtgggagtgggaccgggagagctcttcaacaacatctcatcgacaacatatcagctttcctcctcaacaaaaagtatctcattgtaatcgatgacatttggcattgggaagaatgggaagtcatcagaaagtccattcccaagaatgatctgggtggtagaataatcatgactactcgtcttaattcaatagctgagaagtgccacactgatgacaatgatgtttttgtctacgaagttggggatctagataataatgatgcttggtcgttgtcttgggggatagcaacaaagtctggggcaggcaacaggatcggaactggagaggataattcatgctatgatattgtgaacatgtgttatggtatgcctttagcacttatttggctgtcgtcagcattggttggagagatagaagaattaggtggtgctgaagtgaaaaaatgtagggatttgagacacatagaggatggtattttggacatcccatccttacaaccattggcggagagtttatgccttggttataaccatcttcctctttatctgaggactttgttgttgtactgtagtgcataccattggtctaacagaatcgaaaggggtcgtctggtcaggaggtggattgcggaaggatttgtgtcggaagagaaagaagcagaaggttactttggcgagcttattaacagaggatggattacgcagcacggagacaacaacagttataattactatgagatccaccccgtgatgctggccttcctgagatgcaagtccaaggagtacaattttttaacatgcttgggtctgggatctgatactagtactagtgcatcctccccaaggttgattcgccggctgtctcttcagggggggtatccagtggactgcttgtcaagcatgagtatggatgtgtcacacacttgcagccttgtcgtccttggtgacgtggcgcgacccaagggaatccccttctatatgtttaagcgcttgcgagtgttggaccttgaagataataaggatatacaggattctcatctgcagggcatatgtgaacagttaagcctcagagtgaggtaccttggtctcaagggaacgcggatccgaaagctccctcaggagatgaggaagctgaagcatttggagattttgtatgtggggagcactcggatcagtgaacttccgcaagagattggagagctgaagcatctgcggattctggacgtgagaaacacggacatcactgagctcccactgcagatacgggagctgcagcatctgcacactctggacgtgaggaacactccaatcagtgagctcccgccgcaggttggcaagctgcagaatctcaagattatgtgcgtgaggagcactggggttagggagctcccaaaggagattggggagctgaatcatctacagactctggacgtgagaaacacgagggtgagagagctgccatggcaagctggccagatctcccaatcgttgcgcgtgcttgccggtgacagtggcgatggcgtgcggttgcccgaaggcgtctgcgaagctctgatcaacggtattccaggggctacgcgtgcaaaatgcagggaggttctgtccatcgcgatcatcgatcgtttcggacctccccttgttgggatattcaaagttcccggcagtcatatgcgtatcccgaagatgatcaaagaccacttccgcgttctttcttgcctagacatcaggctctgccacaagcttgaggatgatgaccaaaagttcctcgccgagatgcccaacctgcagacgctcgtgctgaggttcgaggccctaccaagacaacccataaccatcaacggcacaggcttccagatgctggagagcttccgtgtcgacagccgggtgccaaggatagccttccatgaagacgccatgcccaacctcaagcttctcgagttcaagttctacgccggcccagcaagcaacgatgccatcggcatcaccaacctgaagagcctccaaaaggtggtctttcggtgctcgccatggtacaagagcgacgcccctggcatcagcgccaccattgacgtcgtgaagaaagaagccgaggagcatcccaaccggccgatcaccctcctcatcaatgctgggtataaggagatatcaactgagtcacacgggagcagtgaaaacattgcgggcagcagtgggatcgatactgagcctgcacaggcacagcatgataatctccctgctgttcgagatgactacaagggaaaagggattcttcttgatggcaggtgtcctacctgcggccgagcgactaaaattgaagaggaaacccaagatcgagtagcagatattgaaattcaaacagaaactactagctag

SEQ ID NO: 179 - protein, 1143 aa, Oryza sativa
MEAAAMAVTAATGALAPVLVKLAALLDDGECNLLEGSRSDAEFIRSELEAVHSLLTPNILGRMGDDDAACKDGLIAEVRELSYDLDDAVDDFLELNFEQRRSASPFGELKARVEERVSNRFSDWKLPAASLPPSSVHRRAGLPPPDAGLVGMHKRKEELIELLEQGSSDASRWRKRKPHVPLRIMGGEMQKIVFKIPMVDDKSRTKAMSLVASTVGVHSVAIAGDLRDQVVVVGDGIDSINLVSALRKKVGPAMFLEVSQVKEDVKEITAMLAPVKSICEFHEVKTICILGLPGGGKTTIARVLYHALGTQFQCRVFASISPSSSPSPNLTETLADIFAQAQLGVTDTLSTPYGGSGTGRALQQHLIDNISAFLLNKKYLIVIDDIWHWEEWEVIRKSIPKNDLGGRIIMTTRLNSIAEKCHTDDNDVFVYEVGDLDNNDAWSLSWGIATKSGAGNRIGTGEDNSCYDIVNMCYGMPLALIWLSSALVGEIEELGGAEVKKCRDLRHIEDGILDIPSLQPLAESLCLGYNHLPLYLRTLLLYCSAYHWSNRIERGRLVRRWIAEGFVSEEKEAEGYFGELINRGWITQHGDNNSYNYYEIHPVMLAFLRCKSKEYNFLTCLGLGSDTSTSASSPRLIRRLSLQGGYPVDCLSSMSMDVSHTCSLVVLGDVARPKGIPFYMFKRLRVLDLEDNKDIQDSHLQGICEQLSLRVRYLGLKGTRIRKLPQEMRKLKHLEILYVGSTRISELPQEIGELKHLRILDVRNTDITELPLQIRELQHLHTLDVRNTPISELPPQVGKLQNLKIMCVRSTGVRELPKEIGELNHLQTLDVRNTRVRELPWQAGQISQSLRVLAGDSGDGVRLPEGVCEALINGIPGATRAKCREVLSIAIIDRFGPPLVGIFKVPGSHMRIPKMIKDHFRVLSCLDIRLCHKLEDDDQKFLAEMPNLQTLVLRFEALPRQPITINGTGFQMLESFRVDSRVPRIAFHEDAMPNLKLLEFKFYAGPASNDAIGITNLKSLQKVVFRCSPWYKSDAPGISATIDVVKKEAEEHPNRPITLLINAGYKEISTESHGSSENIAGSSGIDTEPAQAQHDNLPAVRDDYKGKGILLDGRCPTCGRATKIEEETQDRVADIEIQTETTS

SEQ ID NO: 180 - DNA, 6319 bp, Oryza sativa
atggaggcggctgccatggccgtaaccgcagccacgggggccttggcgcccgtgctagtgaagctggccgctttgctggacgacggggagtgcaatcttctggaggggagccggagcgacgcagagttcatcagatccgagctggaggccgtgcactctctcctcaccccaaatatcttggggaggatgggggatgacgatgcggcgtgcaaggatggcttgattgcggaggtccgggagctgtcctacgacctggatgatgccgtcgacgacttcttggagctcaatttcgagcagcgaagaagcgcaagccctttcggtgagctcaaggcaagagttgaggagcgtgtctccaatcgcttctctgactggaagctaccggcggcgagccttccgccgtcgtcggtacaccgtcgagctggcttgccgccaccagatgcagggctggtggggatgcacaaacgtaaggaagagctcatcgagttgctggaacaagggagcagtgatgcttcacgatggcgcaagcgaaaacctcatgtccccctcaggataatgggaggggaaatggtaccggtggatctcgattcctcacaaatagcttcgcttccttggatggcgctgccaataaatttgtttactttttctcttgattcttcaacttggaagtacttcattttttgttgcagcaaaaaatcgtgttcaagattcccatggtggacgataagagccgtacaaaagcaatgtcattggttgcaagtacggttggagtgcactcggttgcaatcgccggtgacctaagagaccaggttgtggtggtcggtgatggcattgactccatcaatctggtctctgcgctccggaagaaggtgggccctgcgatgtttctggaggtcagccaagtaaaggaagatgtgaaggagataacggcgatgcttgcgccggtgaaatccatatgtgaatttcacgaggtcaaaacaatttgcatccttggattgccagggggaggcaaaacaacgattgcccgagtactatatcatgcattgggaacgcagttccaatgccgggttttcgcatcaatctctccaagttccagccccagtcccaatctaacagagactcttgcagacattttcgctcaagcacaactaggagtaactgatacacttagcacaccatatggtgggagtgggaccgggagagctcttcaacaacatctcatcgacaacatatcagctttcctcctcaacaaaaagtaagcaatatcttatatctcttatctagcttgtccttaatccggcttcccaaattaaagtgaacaggctatatgtccatataatgttgggttttttttttctgtcctcgatgaggtatatatcaagatatgccaaactttttttaattagcattactttattctacctagtaaatagatacagaaatggggcaggcccctcctttgtgacaggccaatggttttatgatgtggaaacaactcccttatcactgaagctcttgctattactcgtgatggtactgatcttgcaaaggcttgcagtatttgtaaatccacagggagtggtcatcttttttttttaagataatgaatagaaatctggcctctatatagaaagccaaaggttacacaagtgcatacactccaaatctcaaagctgagaaacacgaaaaacaaacgaccaaaaagaaaagacgataagattaagtttcaagcttttcctccttgcttcagaaaacagggaaatgcagagctagcccgctcttcccctgccatgccctctcactgccattgcaactaccacaaaagctcccctgtttcgccgtgagcgaagggaggggatggaactagtctgctgctttgttgtcgccaagcactggtttcatgctgcccaaacaacctatgccccgctagcgataacgagtctgttgccgccatgctgttgtcgctggagagcacttgtcgctgctcagctatgtgttaagtaagctactaacaatctctccattctcttgtagactgcttataaaagattgtacttcaactttttattaatgaaatagagttcctgccttacaacaacaagaacgagagagagagagagagccaatatcatgagttagcactgtgaagacttcctgactgttatgtcttcaagaacagtataaaagcatttgccactataaaaatatgatagccctcaagatcattaaaaatatgtcatgttcttttaccttcataacaaccagtatcacaaatatgaaaacatttaaaggaaaatcagtatttgccatttatgtaaagaaaaactagactagaactctgggcttttattttagtgcacactgtatacatgtgtgttctttgacgtatatacttgatattttttcaaaaacttttgggggcatatctgtaacccatgccccatgcatccaaagtagtagtgagacaactttcgtatcaatggacatgtggcattaaatttaatcccaatatttgttctctcgaagtcctgaacatataattggacaaaattatataatttaattaggccaattgagccatatatacacacactataagaaacttctacaaaacaaacattcgctccttttaggttttgaccagtctatacatgaaccagccaacggtgtgctggtctgactataaatgtttttttagagagtaaaggcaccttccagtacctctctcgaggacagtaaaaacacccatgctttaaggttatgaacaacaaagcatagaacaaccacaagaaaaaaaaacaactagaacaagttctggaactagttagggattcgggaagccattgcttgctggcttgggacaagctatgcctgccattggactatggtggagactgggcataaaggatctcaatctcttggagattggcctatgtcctaggtggccatggctgactgcaaggagatatatttcttgcaacggaaattttcattgcaaaagctgaaaatcgttgtgatatgtacctattgtgacataattgaatccattgggagccgtagcaataaatcccgtggtaataggctattgcaatgattttccgatggttgcataaaaaggtgctattacaatggttttgcattgctattgcaacaacttgatatgtcataggtatttattgcaacagtttgtaccatgctgcaataagatttcgcaacacagacctattcattaaatagcctatttccacacattcatttttgtggcaataattcagtgcgacaagcatgttctatagctataacctgatgcaacgggttagacttgttgcagtaacttattagcacatttaattttttactaaatttatattgattcaactatttcaacatcattcaatacagtaaatactggaaaatgcaagcaatctccaaaaattcaccaataagagaaacgaattaaatcatatacacaattatttcacaccgtacagtgcacttaagtgtaggaaatataatgctatatacatttccaaccctcaatacaggttctgtaaataatgaaaagaaacatcaatttgatttcttgaccggtccctctgagacacacagtgctttcctcagcaacatcgttgccgatctatgtaacttgtaaactccttgtgcttaataaattctggccagggttacttcagcctgcatggcgaaaaaaaagaacttgttagggagatcgcaaacaaatgttagctgccccatttcttctctactgaccataaaagctctaggatcaggtcatgaaaacaatgccgtcagaccggaaatactcaagattcagaacacgactcctaggaactgcaagtttaaatttcaacaaaagcaaaatacaaccagatgacaaactaatatatatcagctgactgttcatctcaagtggactcacatctgtgaaattgttagctctatgcatatatgctaatgtaatactaatatgctattgaggcttattactcttctcgacttttataggtatctcattgtaatcgatgacatttggcattgggaagaatgggaagtcatcagaaagtccattcccaagaatgatctgggtggtagaataatcatgactactcgtcttaattcaatagctgagaagtgccacactgatgacaatgatgtttttgtctacgaagttggggatctagataataatgatgcttggtcgttgtcttgggggatagcaacaaagtctggggcaggcaacaggatcggaactggagaggataattcatgctatgatattgtgaacatgtgttatggtatgcctttagcacttatttggctgtcgtcagcattggttggagagatagaagaattaggtggtgctgaagtgaaaaaatgtagggatttgagacacatagaggatggtattttggacatcccatccttacaaccattggcggagagtttatgccttggttataaccatcttcctctttatctgaggactttgttgttgtactgtagtgcataccattggtctaacagaatcgaaaggggtcgtctggtcaggaggtggattgcggaaggatttgtgtcggaagagaaagaagcagaaggttactttggcgagcttattaacagaggatggattacgcagcacggagacaacaacagttataattactatgagatccaccccgtgatgctggccttcctgagatgcaagtccaaggagtacaattttttaacatgcttgggtctgggatctgatactagtactagtgcatcctccccaaggttgattcgccggctgtctcttcagggggggtatccagtggactgcttgtcaagcatgagtatggatgtgtcacacacttgcagccttgtcgtccttggtgacgtggcgcgacccaagggaatccccttctatatgtttaagcgcttgcgagtgttggaccttgaagataataaggatatacaggattctcatctgcagggcatatgtgaacagttaagcctcagagtgaggtaccttggtctcaagggaacgcggatccgaaagctccctcaggagatgaggaagctgaagcatttggagattttgtatgtggggagcactcggatcagtgaacttccgcaagagattggagagctgaagcatctgcggattctggacgtgagaaacacggacatcactgagctcccactgcagatacgggagctgcagcatctgcacactctggacgtgaggaacactccaatcagtgagctcccgccgcaggttggcaagctgcagaatctcaagattatgtgcgtgaggagcactggggttagggagctcccaaaggagattggggagctgaatcatctacagactctggacgtgagaaacacgagggtgagagagctgccatggcaagctggccagatctcccaatcgttgcgcgtgcttgccggtgacagtggcgatggcgtgcggttgcccgaaggcgtctgcgaagctctgatcaacggtattccaggggctacgcgtgcaaaatgcagggaggttctgtccatcgcgatcatcgatcgtttcggacctccccttgttgggatattcaaagttcccggcagtcatatgcgtatcccgaagatgatcaaagaccacttccgcgttctttcttgcctagacatcaggctctgccacaagcttgaggatgatgaccaaaagttcctcgccgagatgcccaacctgcagacgctcgtgctgaggttcgaggccctaccaagacaacccataaccatcaacggcacaggcttccagatgctggagagcttccgtgtcgacagccgggtgccaaggatagccttccatgaagacgccatgcccaacctcaagcttctcgagttcaagttctacgccggcccagcaagcaacgatgccatcggcatcaccaacctgaagagcctccaaaaggtggtctttcggtgctcgccatggtacaagagcgacgcccctggcatcagcgccaccattgacgtcgtgaagaaagaagccgaggagcatcccaaccggccgatcaccctcctcatcaatgctgggtataaggagatatcaactgagtcacacgggagcagtgaaaacattgcgggcagcagtgggatcgatactgagcctgcacaggcacagcatgataatctccctgctgttcgagatgactacaagggaaaagggattcttcttgatggcaggtgtcctacctgcggccgagcgactaaaattgaagaggaaacccaagatcgagtagcagatattgaaattcaaacagaaactactagctag

SEQ ID NO: 181 - DNA, 3066 bp, Artificial Sequence; identical to SEQ ID NO: 169
  cDNA

SEQ ID NO: 182 - protein, 1021 aa, Oryza sativa; identical to SEQ ID NO: 170
  cDNA

SEQ ID NO: 183 - DNA, 3229 bp, Oryza sativa; identical to SEQ ID NO: 171

SEQ ID NO: 184 - DNA, 342 bp, Artificial Sequence
  cDNA
atgcgtgttaccacttttaacacattccttctcactttgggaactgtcgctgtcgtcaatgccgaaacgggcaacaaatatatagaaaaacgcgctatcgacctaagtcgagagcgagaccctaactttttcgaccaccctggtattcctgtacccgaatgtttttggtttatgtttaaaaacaacgtacgtcaagatgctggaacctgttacagctcttggaaaatggacatgaaagttggtccaaactgggtccatattaaatcagacgataattgcaatttgtcgggcgacttccctccaggttggattgttttggggaaaaaaaggcccggcttttaa

SEQ ID NO: 185 - protein, 113 aa, Magnaporthe oryzae
MRVTTFNTFLLTLGTVAVVNAETGNKYIEKRAIDLSRERDPNFFDHPGIPVPECFWFMFKNNVRQDAGTCYSSWKMDMKVGPNWVHIKSDDNCNLSGDFPPGWIVLGKKRPGF

SEQ ID NO: 186 - DNA, 3429 bp, Artificial Sequence
  cDNA
atggaggcggctgccatggccgtaaccgcagccacgggggccttggcgcccgtgctagtgaagctggccgctttgctggacgacggggagtgcaatcttctggaggggagccggagcgacgcagagttcatcagatccgagctggaggccgttcattctctcctcaccccaaatatcttggggaggatgggggatgacgatgcggcgtgcaaggatggcttgattgcggaggtccgggagctgtcctacgacctggatgatgccgtcgacgacttcttggagctcaatttcgagcagcgaagaagcgcaagccctttcggtgagctcaaggcaagagttgaggagcatgtctccaatcgcttctctgactggaagctaccggcggcgagccttccgccgtcgtcggtacaccgccgagctggcttgccgccaccagatgcagagctggtggggatggacaaacgtatggaagagctcaccaaattgctggaacaagggagcaatgatgcttcacgatggcgcaagcgaaaaccgcatttcccgctcagaaaaacagggctaaagcaaaaaatcgtgatcaaggttgccatggagggcaataattgccgttcaaaagcaatggctttagttgcgagcactggaggagtggactcggttgcgctcgtaggtgatctaagagacaagatagaggtggtcggttatggcattgaccccatcaagctgatctccgcgctccggaagaaggtgggcgatgcggagttgctgcaggtcagccaagcaaataaagatgtgaaggagacgacgccgatgcttgcgccggtgaaatccatatgtgaatttcacaaggtcaaaacagtttgcatccttggattgccaggtggaggcaaaacaacggttgccagagaattatatgacgccttgggaacgcacttcccatgccgggttttcgtgtcagtctctccaagttctagtcccagtcccaatctcacaaagactcttgcagacattttcgctcaagcacaactaggagtaaccgatacacttagcacatcatatggtgggagtgggaccgggagagctcttcaacaacatctcatcgacaacatatcagctttcctcctcaacaaaaagtatctcattgtaatcgatgacatttggcattgggaagaatgggaagtcatcagaaagtccattcccaagaatgatctgggtggtagaataatcatgactactcgtcttaattcaatagctgagaagtgccacactgatgacaatgatgtttttgtctacgaagttggggatctagataataatgatgctttgtcgttgtcttgggggatagcaacaaagtctggggcaggcaacaggatcggaactggagaggataatccatgctatgatattgtgaacatgtgttatggtatgcctttagcacttatttggctgtcgtcagcattggttggagagatagaagaattaggtggtgctgaagtgaaaaaatgtagggatttgagacacatagaggatggtattttggacatcccatccttacaaccattggcggagagtttatgccttggttataaccatcttcctctttatctgaggactttgttgttgtactgtagtgcataccattggtctaacagaatcgaaaggggtcgtctggtcaggaggtggattgcggaaggatttgtgtcggaagagaaagaagcagaaggttactttggcgagcttattaacagaggatggattacgcagcacggagacaacaacagttataattactatgagatccaccccgtgatgctggccttcctgagatgcaagtccaaggagtacaattttttaacatgcttgggtctgggatctgatactagtactagtgcatcctccccaaggttgattcgccggctgtctcttcagggggggtatccagtggactgcttgtcaagcatgagtatggatgtgtcacacacttgcagccttgtcgtccttggtgacgtggcgcgacccaagggaatccccttctatatgtttaagcgcttgcgagtgttggaccttgaagataataaggatatacaggattctcatctgcagggcatatgtgaacagttaagcctcagagtgaggtaccttggtctcaagggaacgcggatccgaaagctccctcaggagatgaggaagctgaagcatttggagattttgtatgtggggagcactcggatcagtgaacttccgcaagagattggagagctgaagcatctgcggattctggacgtgagaaacacggacatcactgagctcccactgcagatacgggagctgcagcatctgcacactctggacgtgaggaacactccaatcagtgagctcccgccgcaggttggcaagctgcagaatctcaagattatgtgcgtgaggagcactggggttagggagctcccaaaggagattggggagctgaatcatctacagactctggacgtgagaaacacgagggtgagagagctgccatggcaagctggccagatctcccaatcgttgcgcgtgcttgccggtgacagtggcgatggcgtgcggttgcccgaaggcgtctgcgaagctctgatcaacggtattccaggggctacgcgtgcaaaatgcagggaggttctgtccatcgcgatcatcgatcgtttcggacctccccttgttgggatattcaaagttcccggcagtcatatgcgtatcccgaagatgatcaaagaccacttccgcgttctttcttgcctagacatcaggctctgccacaagcttgaggatgatgaccaaaagttcctcgccgagatgcccaacctgcagacgctcgtgctgaggttcgaggccctaccaagacaacccataaccatcaacggcacaggcttccagatgctggagagcttccgtgtcgacagccgggtgccaaggatagccttccatgaagacgccatgcccaacctcaagcttctcgagttcaagttctacgccggcccagcaagcaacgatgccatcggcatcaccaacctgaagagcctccaaaaggtggtctttcggtgctcgccatggtacaagagcgacgcccctggcatcagcgccaccattgacgtcgtgaagaaagaagccgaggagcatcccaaccggccgatcaccctcctcatcaatgctgggtataaggagatatcaactgagtcacacgggagcagtgaaaacattgcgggcagcagtgggatcgatactgagcctgcacaggcacagcatgataatctccctgctgttcgagatgactacaagggaaaagggattcttcttgatggcaggtgtcctacctgcggccgagcgactaaaattgaagaggaaacccaagatcgagtagcagatattgaaattcaaacagaaactactagctag

SEQ ID NO: 187 - protein, 1142 aa, Oryza sativa
MEAAAMAVTAATGALAPVLVKLAALLDDGECNLLEGSRSDAEFIRSELEAVHSLLTPNILGRMGDDDAACKDGLIAEVRELSYDLDDAVDDFLELNFEQRRSASPFGELKARVEEHVSNRFSDWKLPAASLPPSSVHRRAGLPPPDAELVGMDKRMEELTKLLEQGSNDASRWRKRKPHFPLRKTGLKQKIVIKVAMEGNNCRSKAMALVASTGGVDSVALVGDLRDKIEVVGYGIDPIKLISALRKKVGDAELLQVSQANKDVKETTPMLAPVKSICEFHKVKTVCILGLPGGGKTTVARELYDALGTHFPCRVFVSVSPSSSPSPNLTKTLADIFAQAQLGVTDTLSTSYGGSGTGRALQQHLIDNISAFLLNKKYLIVIDDIWHWEEWEVIRKSIPKNDLGGRIIMTTRLNSIAEKCHTDDNDVFVYEVGDLDNNDALSLSWGIATKSGAGNRIGTGEDNPCYDIVNMCYGMPLALIWLSSALVGEIEELGGAEVKKCRDLRHIEDGILDIPSLQPLAESLCLGYNHLPLYLRTLLLYCSAYHWSNRIERGRLVRRWIAEGFVSEEKEAEGYFGELINRGWITQHGDNNSYNYYEIHPVMLAFLRCKSKEYNFLTCLGLGSDTSTSASSPRLIRRLSLQGGYPVDCLSSMSMDVSHTCSLVVLGDVARPKGIPFYMFKRLRVLDLEDNKDIQDSHLQGICEQLSLRVRYLGLKGTRIRKLPQEMRKLKHLEILYVGSTRISELPQEIGELKHLRILDVRNTDITELPLQIRELQHLHTLDVRNTPISELPPQVGKLQNLKIMCVRSTGVRELPKEIGELNHLQTLDVRNTRVRELPWQAGQISQSLRVLAGDSGDGVRLPEGVCEALINGIPGATRAKCREVLSIAIIDRFGPPLVGIFKVPGSHMRIPKMIKDHFRVLSCLDIRLCHKLEDDDQKFLAEMPNLQTLVLRFEALPRQPITINGTGFQMLESFRVDSRVPRIAFHEDAMPNLKLLEFKFYAGPASNDAIGITNLKSLQKVVFRCSPWYKSDAPGISATIDVVKKEAEEHPNRPITLLINAGYKEISTESHGSSENIAGSSGIDTEPAQAQHDNLPAVRDDYKGKGILLDGRCPTCGRATKIEEETQDRVADIEIQTETTS

SEQ ID NO: 188 - DNA, 6350 bp, Oryza sativa
atggaggcggctgccatggccgtaaccgcagccacgggggccttggcgcccgtgctagtgaagctggccgctttgctggacgacggggagtgcaatcttctggaggggagccggagcgacgcagagttcatcagatccgagctggaggccgttcattctctcctcaccccaaatatcttggggaggatgggggatgacgatgcggcgtgcaaggatggcttgattgcggaggtccgggagctgtcctacgacctggatgatgccgtcgacgacttcttggagctcaatttcgagcagcgaagaagcgcaagccctttcggtgagctcaaggcaagagttgaggagcatgtctccaatcgcttctctgactggaagctaccggcggcgagccttccgccgtcgtcggtacaccgccgagctggcttgccgccaccagatgcagagctggtggggatggacaaacgtatggaagagctcaccaaattgctggaacaagggagcaatgatgcttcacgatggcgcaagcgaaaaccgcatttcccgctcagaaaaacagggctaaaggtacggttggatctcgattcttcacaaatatagcttcctccgatagcagtgccaatgaatttgtttacttctctcttgattctttaatttggaagtactgtataacaaacatggagggatcgtcatttaacttaattttttttgttgcagcaaaaaatcgtgatcaaggttgccatggagggcaataattgccgttcaaaagcaatggctttagttgcgagcactggaggagtggactcggttgcgctcgtaggtgatctaagagacaagatagaggtggtcggttatggcattgaccccatcaagctgatctccgcgctccggaagaaggtgggcgatgcggagttgctgcaggtcagccaagcaaataaagatgtgaaggagacgacgccgatgcttgcgccggtgaaatccatatgtgaatttcacaaggtcaaaacagtttgcatccttggattgccaggtggaggcaaaacaacggttgccagagaattatatgacgccttgggaacgcacttcccatgccgggttttcgtgtcagtctctccaagttctagtcccagtcccaatctcacaaagactcttgcagacattttcgctcaagcacaactaggagtaaccgatacacttagcacatcatatggtgggagtgggaccgggagagctcttcaacaacatctcatcgacaacatatcagctttcctcctcaacaaaaagtaagcaatatcttatatctcttatctagcttgtccttaatccggcttcccaaattaaagtgaacaggctatatgtccatataatgttgggttttttttttctgtcctcgatgaggtatatatcaagatatgccaaactttttttaattagcgttactttattctacctagtaaatagatacagaaatggggcaggcccctcctttgtgacaggccaatggttttatgatgtggaaacaactcccttatcactgaagctcttgctattactcgtgatggtactgatcttgcaaaggcttgcagtatttgtaaatccacagggagtggtcatctttttttttttaagataatgaatagaaatctggcctctatatagaaagccaaaggttacacaagtgcatacactccaaatctcaaagctgagaaacacgaaaaacaaacgaccaaaaagaaaagacgataagattaagtttcaagcttttcctccttgcttcagaaaacagggaaatgcagagctagcccgctcttcccctgccatgccctctcactgccattgcaactaccacaaaagctcccctgtttcgccgtgagcgaagggaggggatggaactagtctgctgctttgttgtcgccaagcactggtttcatgctgcccaaacaacctatgccccgctagcgataacgagtctgttgccgccatgctgttgtcgctggagagcacttgtcgctgctcagctatgtgttaagtaagctactaacaatctctccattctcttgtagactgcttataaaagattgtacttcaactttttattaatgaaatagagttcctgccttacaacaacaagaacgagagagagagagagagccaatatcacgagttagcactgtgaagacttcctgactgttatgtcttcaagaacagtataaaagcatttgccactataaaaatatgatagccctcaagatcattaaaaatatgtcatgttcttttaccttcataacaaccagtatcacaaatatgaaaacatttaaaggaaaatcagtatttgccatttatgtaaagaaaaactagactagaactctgggcttttattttagtgcacactgtatacatgtgtgttctttgacgtatatacttgatattttttcaaaaacttttgggggcatatctgtaacccatgccccatgcatccaaagtagtagtgagacaactttcgtatcaatggacatgtggcattaaatttaatcccaatatttgttctctcgaagtcctgaacatataattggacaaaattatataatttaattaggccaattgagccatatatacacacactataagaaacttctacaaaacaaacattcgctccttttaggttttgaccagtctatacatgaaccagccaacggtgtgctggtctgactataaatgtttttttagagagtaaaggcaccttccagtacctctctcgaggacagtaaaaacacccatgctttaaggttatgaacaacaaagcatagaacaaccacaagaaaaaaaaaaacaactagaacaagttctggaactagttagggattcgggaagccattgcttgctggcttgggacaagctatgcctgccattggactatggtggagactgggcataaaggatctcaatctcttggagattggcctatgtcctaggtggccatggctgactgcaaggagatatatttcttgcaacggaaattttcattgcaaaagctgaaaatcgttgcgatatgtacctattgtgacataattgaatccattgggagccgtagcaataaatcccgtggtaataggctattgcaatgattttccgatggttgcataaaaaggtgctattacaatggttttgcattgctattgcaacaacttgatatgtcataggtatttattgcaacagtttgtaccatgctgcaataagatttcgcaacacagacctattcattaaatagcctatttccacacattcatttttgtggcaataattcagtgcgacaagcatgttctatagctataacctgatgcaacgggttagacttgttgcagtaacttattagcacatttaattttttactaaatttatattgattcaactatttcaacatcattcaatacagtaaatactggaaaatgcaagcaatctccaaaaattcaccaataagagaaacgaattaaatcatatacacaattatttcacaccgtacagtgcacttaagtgtaggaaatataatgctatatacatttccaaccctcaatacaggttctgtaaataatgaaaagaaacatcaatttgatttcttgaccggtccctctgagacacacagtgctttcctcagcaacatcgttgccgatctatgtaacttgtaaactccttgtgcttaataaattctggccagggttacttcagcctgcatggcgaaaaaaaagaacttgttagggagatcgcaaacaaatgttagctgccccatttcttctctactgaccataaaagctctaggatcaggtcatgaaaacaatgccgtcagaccggaaatactcaagattcagaacacgactcctaggaactgcaagtttaaatttcaacaaaagcaaaatacaaccagatgacaaactaatatatatcagctgactgttcatctcaagtggactcacatctgtgaaattgttagttctatgcatatatgctaatgtaatactaatatgctattgaggcttattactcttctcgacttttataggtatctcattgtaatcgatgacatttggcattgggaagaatgggaagtcatcagaaagtccattcccaagaatgatctgggtggtagaataatcatgactactcgtcttaattcaatagctgagaagtgccacactgatgacaatgatgtttttgtctacgaagttggggatctagataataatgatgctttgtcgttgtcttgggggatagcaacaaagtctggggcaggcaacaggatcggaactggagaggataatccatgctatgatattgtgaacatgtgttatggtatgcctttagcacttatttggctgtcgtcagcattggttggagagatagaagaattaggtggtgctgaagtgaaaaaatgtagggatttgagacacatagaggatggtattttggacatcccatccttacaaccattggcggagagtttatgccttggttataaccatcttcctctttatctgaggactttgttgttgtactgtagtgcataccattggtctaacagaatcgaaaggggtcgtctggtcaggaggtggattgcggaaggatttgtgtcggaagagaaagaagcagaaggttactttggcgagcttattaacagaggatggattacgcagcacggagacaacaacagttataattactatgagatccaccccgtgatgctggccttcctgagatgcaagtccaaggagtacaattttttaacatgcttgggtctgggatctgatactagtactagtgcatcctccccaaggttgattcgccggctgtctcttcagggggggtatccagtggactgcttgtcaagcatgagtatggatgtgtcacacacttgcagccttgtcgtccttggtgacgtggcgcgacccaagggaatccccttctatatgtttaagcgcttgcgagtgttggaccttgaagataataaggatatacaggattctcatctgcagggcatatgtgaacagttaagcctcagagtgaggtaccttggtctcaagggaacgcggatccgaaagctccctcaggagatgaggaagctgaagcatttggagattttgtatgtggggagcactcggatcagtgaacttccgcaagagattggagagctgaagcatctgcggattctggacgtgagaaacacggacatcactgagctcccactgcagatacgggagctgcagcatctgcacactctggacgtgaggaacactccaatcagtgagctcccgccgcaggttggcaagctgcagaatctcaagattatgtgcgtgaggagcactggggttagggagctcccaaaggagattggggagctgaatcatctacagactctggacgtgagaaacacgagggtgagagagctgccatggcaagctggccagatctcccaatcgttgcgcgtgcttgccggtgacagtggcgatggcgtgcggttgcccgaaggcgtctgcgaagctctgatcaacggtattccaggggctacgcgtgcaaaatgcagggaggttctgtccatcgcgatcatcgatcgtttcggacctccccttgttgggatattcaaagttcccggcagtcatatgcgtatcccgaagatgatcaaagaccacttccgcgttctttcttgcctagacatcaggctctgccacaagcttgaggatgatgaccaaaagttcctcgccgagatgcccaacctgcagacgctcgtgctgaggttcgaggccctaccaagacaacccataaccatcaacggcacaggcttccagatgctggagagcttccgtgtcgacagccgggtgccaaggatagccttccatgaagacgccatgcccaacctcaagcttctcgagttcaagttctacgccggcccagcaagcaacgatgccatcggcatcaccaacctgaagagcctccaaaaggtggtctttcggtgctcgccatggtacaagagcgacgcccctggcatcagcgccaccattgacgtcgtgaagaaagaagccgaggagcatcccaaccggccgatcaccctcctcatcaatgctgggtataaggagatatcaactgagtcacacgggagcagtgaaaacattgcgggcagcagtgggatcgatactgagcctgcacaggcacagcatgataatctccctgctgttcgagatgactacaagggaaaagggattcttcttgatggcaggtgtcctacctgcggccgagcgactaaaattgaagaggaaacccaagatcgagtagcagatattgaaattcaaacagaaactactagctag

SEQ ID NO: 189 - DNA, 3066 bp, Artificial Sequence; identical to SEQ ID NO: 175
  cDNA

SEQ ID NO: 190 - protein, 1021 aa, Oryza sativa
MELVVGASEATMKSLLGKLGNLLAQEYALISGIRGDIQYINDELASMQAFLRDLSNVPEGHSHGHRMKDWMKQIRDIAYDVEDCIDDFAHRLPQDSISDAKWSFLLTKIYELWTWWPRRVIASNIAQLKVRAQQIADRRSRYGVNNPEHLDSSSSARTRAVNYEIAEYQVTSPQIIGIKEPVGMKTVMEELEVWLTNPQAENGQAVLSIVGFGGVGKTTIATALYRKVSDKFQCRASVAVSQNYDQGKVLNSILSQVSNQEQGSSTTISEKKNLTSGAKSMLKTALSLLRGNCICQPENDGNPDNTPIRLQETTDDDQNPRKLEQLLAEKSYILLIDDIWSAETWESIRSILPKNNKGGRIIVTTRFQAVGSTCSPLETDRLHTVDFLTDDESQNLFNTSICESKIRKDSNKVDEQVPEEIWKICGGLPLAIVTMAGLVACNPRKACCDWSKLCKSLFPEQETPLTLDGVTRILDCCYNDLPADLKTCLLYLSIFPKGWKISRKRLSRRWIAEGFANEKQGLTQERVAEAYFNQLTRRNLVRPMEHGSNGKVKTFQVHDMVLEYIMSKSIEENFITVVGGHWQMTAPSNKVRRLSMQSSGSNRGSSTKGLNLAQVRSLTVFGNLNHMPFHSFNYGIIQVLDLEDWKGLKERHMTEICQMLLLKYLSIRRTEISKIPSKIQKLEYLETLDIRETYVRDLPKSIVQLKRIISILGGNKNTRKGLRLPQEKSKKPIKNPSPQGKTKEPAKKGFLSQEKGKGAMKALRVLSGIEIVEESSEVAAGLHQLTGLRKLAIYKLNITKGGDTFKQLQSSIEYLGSCGLQTLAINDENSEFINSLGDMPAPPRYLVALELSGKLEKLPKWITSITTLNKLTISVTVLRTETLEILHILPSLFSLTFAFSLSAAKQDQDIIKDILENNKLDSDGEIVIPAEGFKSLKLLRFFAPLVPKLSFLDKNAMPALEIIEMRFKDFEGLFGIEILENLREVHLKVSDGAEAITKFLVNDLKVNTEKPKVFVDGIVTA

SEQ ID NO: 191 - DNA, 3230 bp, Oryza sativa; identical to SEQ ID NO: 177

SEQ ID NO: 192 - DNA, 3432 bp, Artificial Sequence
  cDNA
atggaggcggctgccatggccgtaaccgcagccacgggggccttggcgcccgtgctagtgaagctggccgctttgctggacgacggggagtgcaatcttctggaggggagccggagcgacgcagagttcatcagatccgagctggaggccgtgcactctctcctcaccccaaatatcttggggaggatgggggatgacgatgcggcgtgcaaggatggcttgattgcggaggtccgggagctgtcctacgacctggatgatgccgtcgacgacttcttggagctcaatttcgagcagcgaagaagcgcaagccctttcggtgagctcaaggcaagagttgaggagcgtgtctccaatcgcttctctgactggaagctaccggcggcgagccttccgccgtcgtcggtacaccgtcgagctggcttgccgccaccagatgcagggctggtggggatgcacaaacgtaaggaagagctcatcgagttgctggaacaagggagcagtgatgcttcacgatggcgcaagcgaaaacctcatgtccccctcaggataatgggaggggaaatgcaaaaaatcgtgttcaagattcccatggtggacgataagagccgtacaaaagcaatgtcattggttgcaagtacggttggagtgcactcggttgcaatcgccggtgacctaagagacgaggttgtggtggtcggtgatggcattgactccatcaatctggtctctgcgctccggaagaaggtgggccctgcgatgtttctggaggtcagccaagcaaaggaagatgtgaaggagataacggcgatgcttgcgccggtgaaatccatatgtgaatttcacgaggtcaaaacaatttgcatccttggattgccagggggaggcaaaacaacgattgcccgagtactatatcatgcattgggaacgcagttccaatgccgggttttcgcatcaatctctccaagttccagccccagtcccaatctaacagagactcttgcagacattttcgctcaagcacaactaggagtaactgatacacttagcacaccatatggtgggagtgggaccgggagagctcttcaacaacatctcatcgacaacatatcagctttcctcctcaacaaaaagtatctcattgtaatcgatgacatttggcattgggaagaatgggaagtcatcagaaagtccattcccaagaatgatctgggtggtagaataatcatgactactcgtcttaattcaatagctgagaagtgccacactgatgacaatgatgtttttgtctacgaagttggggatctagataataatgatgcttggtcgttgtcttgggggatagcaacaaagtctggggcaggcaacaggatcggaactggagaggataattcatgctatgatattgtgaacatgtgttatggtatgcctttagcacttatttggctgtcgtcagcattggttggagagatagaagaattaggtggtgctgaagtgaaaaaatgtagggatttgagacacatagaggatggtattttggacatcccatccttacaaccattggcggagagtttatgccttggttataaccatcttcctctttatctgaggactttgttgttgtactgtagtgcataccattggtctaacagaatcgaaaggggtcgtctggtcaggaggtggattgcggaaggatttgtgtcggaagagaaagaagcagaaggttactttggcgagcttattaacagaggatggattacgcagcacggagacaacaacagttataattactatgagatccaccccgtgatgctggccttcctgagatgcaagtccaaggagtacaattttttaacatgcttgggtctgggatctgatactagtactagtgcatcctccccaaggttgattcgccggctgtctcttcagggggggtatccagtggactgcttgtcaagcatgagtatggatgtgtcacacacttgcagccttgtcgtccttggtgacgtggcgcgacccaagggaatccccttctatatgtttaagcgcttgcgagtgttggaccttgaagataataaggatatacaggattctcatctgcagggcatatgtgaacagttaagcctcagagtgaggtaccttggtctcaagggaacgcggatccgaaagctccctcaggagatgaggaagctgaagcatttggagattttgtatgtggggagcactcggatcagtgaacttccgcaagagattggagagctgaagcatctgcggattctggacgtgagaaacacggacatcactgagctcccactgcagatacgggagctgcagcatctgcacactctggacgtgaggaacactccaatcagtgagctcccgccgcaggttggcaagctgcagaatctcaagattatgtgcgtgaggagcactggggttagggagctcccaaaggagattggggagctgaatcatctacagactctggacgtgagaaacacgagggtgagagagctgccatggcaagctggccagatctcccaatcgttgcgcgtgcttgccggtgacagtggcgatggcgtgcggttgcccgaaggcgtctgcgaagctctgatcaacggtattccaggggctacgcgtgcaaaatgcagggaggttctgtccatcgcgatcatcgatcgtttcggacctccccttgttgggatattcaaagttcccggcagtcatatgcgtatcccgaagatgatcaaagaccacttccgcgttctttcttgcctagacatcaggctctgccacaagcttgaggatgatgaccaaaagttcctcgccgagatgcccaacctgcagacgctcgtgctgaggttcgaggccctaccaagacaacccataaccatcaacggcacaggcttccagatgctggagagcttccgtgtcgacagccgggtgccaaggatagccttccatgaagacgccatgcccaacctcaagcttctcgagttcaagttctacgccggcccagcaagcaacgatgccatcggcatcaccaacctgaagagcctccaaaaggtggtctttcggtgctcgccatggtacaagagcgacgcccctggcatcagcgccaccattgacgtcgtgaagaaagaagccgaggagcatcccaaccggccgatcaccctcctcatcaatgctgggtataaggagatatcaactgagtcacacgggagcagtgaaaacattgcgggcagcagtgggatcgatactgagcctgcacaggcacagcatgataatctccctgctgttcgagatgactacaagggaaaagggattcttcttgatggcaggtgtcctacctgcggccgagcgactaaaattgaagaggaaacccaagatcgagtagcagatattgaaattcaaacagaaactactagctag

SEQ ID NO: 193 - protein, 1143 aa, Oryza sativa
MEAAAMAVTAATGALAPVLVKLAALLDDGECNLLEGSRSDAEFIRSELEAVHSLLTPNILGRMGDDDAACKDGLIAEVRELSYDLDDAVDDFLELNFEQRRSASPFGELKARVEERVSNRFSDWKLPAASLPPSSVHRRAGLPPPDAGLVGMHKRKEELIELLEQGSSDASRWRKRKPHVPLRIMGGEMQKIVFKIPMVDDKSRTKAMSLVASTVGVHSVAIAGDLRDEVVVVGDGIDSINLVSALRKKVGPAMFLEVSQAKEDVKEITAMLAPVKSICEFHEVKTICILGLPGGGKTTIARVLYHALGTQFQCRVFASISPSSSPSPNLTETLADIFAQAQLGVTDTLSTPYGGSGTGRALQQHLIDNISAFLLNKKYLIVIDDIWHWEEWEVIRKSIPKNDLGGRIIMTTRLNSIAEKCHTDDNDVFVYEVGDLDNNDAWSLSWGIATKSGAGNRIGTGEDNSCYDIVNMCYGMPLALIWLSSALVGEIEELGGAEVKKCRDLRHIEDGILDIPSLQPLAESLCLGYNHLPLYLRTLLLYCSAYHWSNRIERGRLVRRWIAEGFVSEEKEAEGYFGELINRGWITQHGDNNSYNYYEIHPVMLAFLRCKSKEYNFLTCLGLGSDTSTSASSPRLIRRLSLQGGYPVDCLSSMSMDVSHTCSLVVLGDVARPKGIPFYMFKRLRVLDLEDNKDIQDSHLQGICEQLSLRVRYLGLKGTRIRKLPQEMRKLKHLEILYVGSTRISELPQEIGELKHLRILDVRNTDITELPLQIRELQHLHTLDVRNTPISELPPQVGKLQNLKIMCVRSTGVRELPKEIGELNHLQTLDVRNTRVRELPWQAGQISQSLRVLAGDSGDGVRLPEGVCEALINGIPGATRAKCREVLSIAIIDRFGPPLVGIFKVPGSHMRIPKMIKDHFRVLSCLDIRLCHKLEDDDQKFLAEMPNLQTLVLRFEALPRQPITINGTGFQMLESFRVDSRVPRIAFHEDAMPNLKLLEFKFYAGPASNDAIGITNLKSLQKVVFRCSPWYKSDAPGISATIDVVKKEAEEHPNRPITLLINAGYKEISTESHGSSENIAGSSGIDTEPAQAQHDNLPAVRDDYKGKGILLDGRCPTCGRATKIEEETQDRVADIEIQTETTS

SEQ ID NO: 194 - DNA, 6319 bp, Oryza sativa
atggaggcggctgccatggccgtaaccgcagccacgggggccttggcgcccgtgctagtgaagctggccgctttgctggacgacggggagtgcaatcttctggaggggagccggagcgacgcagagttcatcagatccgagctggaggccgtgcactctctcctcaccccaaatatcttggggaggatgggggatgacgatgcggcgtgcaaggatggcttgattgcggaggtccgggagctgtcctacgacctggatgatgccgtcgacgacttcttggagctcaatttcgagcagcgaagaagcgcaagccctttcggtgagctcaaggcaagagttgaggagcgtgtctccaatcgcttctctgactggaagctaccggcggcgagccttccgccgtcgtcggtacaccgtcgagctggcttgccgccaccagatgcagggctggtggggatgcacaaacgtaaggaagagctcatcgagttgctggaacaagggagcagtgatgcttcacgatggcgcaagcgaaaacctcatgtccccctcaggataatgggaggggaaatggtaccggtggatctcgattcctcacaaatagcttcgcttccttggatggcgctgccaataaatttgtttactttttctcttgattcttcaacttggaagtacttcattttttgttgcagcaaaaaatcgtgttcaagattcccatggtggacgataagagccgtacaaaagcaatgtcattggttgcaagtacggttggagtgcactcggttgcaatcgccggtgacctaagagacgaggttgtggtggtcggtgatggcattgactccatcaatctggtctctgcgctccggaagaaggtgggccctgcgatgtttctggaggtcagccaagcaaaggaagatgtgaaggagataacggcgatgcttgcgccggtgaaatccatatgtgaatttcacgaggtcaaaacaatttgcatccttggattgccagggggaggcaaaacaacgattgcccgagtactatatcatgcattgggaacgcagttccaatgccgggttttcgcatcaatctctccaagttccagccccagtcccaatctaacagagactcttgcagacattttcgctcaagcacaactaggagtaactgatacacttagcacaccatatggtgggagtgggaccgggagagctcttcaacaacatctcatcgacaacatatcagctttcctcctcaacaaaaagtaagcaatatcttatatctcttatctagcttgtccttaatccggcttcccaaattaaagtgaacaggctatatgtccatataatgttgggttttttttttctgtcctcgatgaggtatatatcaagatatgccaaactttttttaattagcattactttattctacctagtaaatagatacagaaatggggcaggcccctcctttgtgacaggccaatggttttatgatgtggaaacaactcccttatcactgaagctcttgctattactcgtgatggtactgatcttgcaaaggcttgcagtatttgtaaatccacagggagtggtcatcttttttttttaagataatgaatagaaatctggcctctatatagaaagccaaaggttacacaagtgcatacactccaaatctcaaagctgagaaacacgaaaaacaaacgaccaaaaagaaaagacgataagattaagtttcaagcttttcctccttgcttcagaaaacagggaaatgcagagctagcccgctcttcccctgccatgccctctcactgccattgcaactaccacaaaagctcccctgtttcgccgtgagcgaagggaggggatggaactagtctgctgctttgttgtcgccaagcactggtttcatgctgcccaaacaacctatgccccgctagcgataacgagtctgttgccgccatgctgttgtcgctggagagcacttgtcgctgctcagctatgtgttaagtaagctactaacaatctctccattctcttgtagactgcttataaaagattgtacttcaactttttattaatgaaatagagttcctgccttacaacaacaagaacgagagagagagagagagccaatatcatgagttagcactgtgaagacttcctgactgttatgtcttcaagaacagtataaaagcatttgccactataaaaatatgatagccctcaagatcattaaaaatatgtcatgttcttttaccttcataacaaccagtatcacaaatatgaaaacatttaaaggaaaatcagtatttgccatttatgtaaagaaaaactagactagaactctgggcttttattttagtgcacactgtatacatgtgtgttctttgacgtatatacttgatattttttcaaaaacttttgggggcatatctgtaacccatgccccatgcatccaaagtagtagtgagacaactttcgtatcaatggacatgtggcattaaatttaatcccaatatttgttctctcgaagtcctgaacatataattggacaaaattatataatttaattaggccaattgagccatatatacacacactataagaaacttctacaaaacaaacattcgctccttttaggttttgaccagtctatacatgaaccagccaacggtgtgctggtctgactataaatgtttttttagagagtaaaggcaccttccagtacctctctcgaggacagtaaaaacacccatgctttaaggttatgaacaacaaagcatagaacaaccacaagaaaaaaaaacaactagaacaagttctggaactagttagggattcgggaagccattgcttgctggcttgggacaagctatgcctgccattggactatggtggagactgggcataaaggatctcaatctcttggagattggcctatgtcctaggtggccatggctgactgcaaggagatatatttcttgcaacggaaattttcattgcaaaagctgaaaatcgttgtgatatgtacctattgtgacataattgaatccattgggagccgtagcaataaatcccgtggtaataggctattgcaatgattttccgatggttgcataaaaaggtgctattacaatggttttgcattgctattgcaacaacttgatatgtcataggtatttattgcaacagtttgtaccatgctgcaataagatttcgcaacacagacctattcattaaatagcctatttccacacattcatttttgtggcaataattcagtgcgacaagcatgttctatagctataacctgatgcaacgggttagacttgttgcagtaacttattagcacatttaattttttactaaatttatattgattcaactatttcaacatcattcaatacagtaaatactggaaaatgcaagcaatctccaaaaattcaccaataagagaaacgaattaaatcatatacacaattatttcacaccgtacagtgcacttaagtgtaggaaatataatgctatatacatttccaaccctcaatacaggttctgtaaataatgaaaagaaacatcaatttgatttcttgaccggtccctctgagacacacagtgctttcctcagcaacatcgttgccgatctatgtaacttgtaaactccttgtgcttaataaattctggccagggttacttcagcctgcatggcgaaaaaaaagaacttgttagggagatcgcaaacaaatgttagctgccccatttcttctctactgaccataaaagctctaggatcaggtcatgaaaacaatgccgtcagaccggaaatactcaagattcagaacacgactcctaggaactgcaagtttaaatttcaacaaaagcaaaatacaaccagatgacaaactaatatatatcagctgactgttcatctcaagtggactcacatctgtgaaattgttagctctatgcatatatgctaatgtaatactaatatgctattgaggcttattactcttctcgacttttataggtatctcattgtaatcgatgacatttggcattgggaagaatgggaagtcatcagaaagtccattcccaagaatgatctgggtggtagaataatcatgactactcgtcttaattcaatagctgagaagtgccacactgatgacaatgatgtttttgtctacgaagttggggatctagataataatgatgcttggtcgttgtcttgggggatagcaacaaagtctggggcaggcaacaggatcggaactggagaggataattcatgctatgatattgtgaacatgtgttatggtatgcctttagcacttatttggctgtcgtcagcattggttggagagatagaagaattaggtggtgctgaagtgaaaaaatgtagggatttgagacacatagaggatggtattttggacatcccatccttacaaccattggcggagagtttatgccttggttataaccatcttcctctttatctgaggactttgttgttgtactgtagtgcataccattggtctaacagaatcgaaaggggtcgtctggtcaggaggtggattgcggaaggatttgtgtcggaagagaaagaagcagaaggttactttggcgagcttattaacagaggatggattacgcagcacggagacaacaacagttataattactatgagatccaccccgtgatgctggccttcctgagatgcaagtccaaggagtacaattttttaacatgcttgggtctgggatctgatactagtactagtgcatcctccccaaggttgattcgccggctgtctcttcagggggggtatccagtggactgcttgtcaagcatgagtatggatgtgtcacacacttgcagccttgtcgtccttggtgacgtggcgcgacccaagggaatccccttctatatgtttaagcgcttgcgagtgttggaccttgaagataataaggatatacaggattctcatctgcagggcatatgtgaacagttaagcctcagagtgaggtaccttggtctcaagggaacgcggatccgaaagctccctcaggagatgaggaagctgaagcatttggagattttgtatgtggggagcactcggatcagtgaacttccgcaagagattggagagctgaagcatctgcggattctggacgtgagaaacacggacatcactgagctcccactgcagatacgggagctgcagcatctgcacactctggacgtgaggaacactccaatcagtgagctcccgccgcaggttggcaagctgcagaatctcaagattatgtgcgtgaggagcactggggttagggagctcccaaaggagattggggagctgaatcatctacagactctggacgtgagaaacacgagggtgagagagctgccatggcaagctggccagatctcccaatcgttgcgcgtgcttgccggtgacagtggcgatggcgtgcggttgcccgaaggcgtctgcgaagctctgatcaacggtattccaggggctacgcgtgcaaaatgcagggaggttctgtccatcgcgatcatcgatcgtttcggacctccccttgttgggatattcaaagttcccggcagtcatatgcgtatcccgaagatgatcaaagaccacttccgcgttctttcttgcctagacatcaggctctgccacaagcttgaggatgatgaccaaaagttcctcgccgagatgcccaacctgcagacgctcgtgctgaggttcgaggccctaccaagacaacccataaccatcaacggcacaggcttccagatgctggagagcttccgtgtcgacagccgggtgccaaggatagccttccatgaagacgccatgcccaacctcaagcttctcgagttcaagttctacgccggcccagcaagcaacgatgccatcggcatcaccaacctgaagagcctccaaaaggtggtctttcggtgctcgccatggtacaagagcgacgcccctggcatcagcgccaccattgacgtcgtgaagaaagaagccgaggagcatcccaaccggccgatcaccctcctcatcaatgctgggtataaggagatatcaactgagtcacacgggagcagtgaaaacattgcgggcagcagtgggatcgatactgagcctgcacaggcacagcatgataatctccctgctgttcgagatgactacaagggaaaagggattcttcttgatggcaggtgtcctacctgcggccgagcgactaaaattgaagaggaaacccaagatcgagtagcagatattgaaattcaaacagaaactactagctag

SEQ ID NO: 195 - DNA, 3066 bp, Artificial Sequence; identical to SEQ ID NO: 169
  cDNA

SEQ ID NO: 196 - protein, 1021 aa, Oryza sativa; identical to SEQ ID NO: 170

SEQ ID NO: 197 - DNA, 3229 bp, Oryza sativa; identical to SEQ ID NO: 171

SEQ ID NO: 198 - DNA, 3690 bp, Artificial Sequence
  cDNA
atggctgcagcactggtcggtggtgcctttctctctgctttccttgatgtgcttttcgacaggctggcttcacctgactttgttgacttgatccttggaaagaagcttagcaagaagttgcttcgaaagttggagaccactctcagagtggttggagctgtgcttgatgatgccgagaagaaacagatcacaaacaccaatgtcaaacactggctcaatgctctcaaagatgctgtctatgaagccgatgacttactcgaccatgttttcaccaaagctgccacccaaaacaaggtaagaaacttgttttctcgcttttccgatcggaagatcgttagtaagttggaggacatagttgtcaccctagagtctcatttaaaactcaaggagagtcttgatttgaaagagagtgcagtggagaacttgtcatggaaagctccatcaacatctctggaagatggatctcatatatatggtagggagaaagatagggaggccataatcaagttgttgtcggaggataacagtgacggtagtgaagtgtctgtggttcctattgtgggcatgggtggggttggaaaaactactttggcccaattggtgtacaatgatgagaatttgaaagagaaatttgattttgattttaaggcatgggtttgtgtttctcaagaatttgatgttctgaaggtcacaaaaactataatacaggcggttactggaaatccttgtaaattgaatgatctgaatctacttcatcttgaattgatggacaagctgaaagataaaaaattcctaattgttttggatgatgtttggacagaggattatgttgattggagtcttcttaagaaaccatttcaatgtgggattattaggagaagtaaaattcttctaacaacccgcagtgaaaagacagcctccgtagtccaaacggttcaaacctatcatctaaaccaattgtcgaatgaagattgttggtcagtgtttgcgaaccatgcgtgtctttccttggaatcgaacgagaacacaacactagaaaaaattggaaaggagattgttaaaaagtgcgatggactgcctttagcagcacagtcccttggaggcatgttgagaagaaagcatgacattggggattggtataatattctgaatagtgacatttgggaactttctgaaagtgagtgtaaagttattccagcactgagacttagttatcattatctccctccacatttaaaacggtgctttgtttattgttcgttgtatccccaagattacgaatttgataaaaatgaattaatcttgttgtggatggctgaagatcttttgaagaaaccaaggaaaggtaggactttagaagaggttggtcatgagtattttgatgatttggtttcgagatcatttttccaacgttcaagtacaaatagaagtagttggccttatggtgaatgttttgtgatgcatgacctcatgcatgatctagccaaatcactcggtggagatttttattttagatcagaagaacttgggaaagaaacaaagatcaatactaagactcgtcatttgtcatttaccaaattcaattcttcagtcttggacaactttgatgttgttggtagagcaaaatttctgagaactttcttgtccattatcaattttgaagctgctccattcaacaacgaggaggcacaatgtatcattgtgtcgaagcttatgtacttgagagttttatcattttgtgacttccaaagtttggattctttgcctgattcaataggtaaattgatccatctgcgctatttagatctttctcattcaagtgtagaaacactgccaaagtcattgtgtaatttatacaatctgcaaactttgaagttgtgtagttgcagaaagctgactaagttgcctagtgacatgtgcaatcttgttaacttgcgtcatcttgagatacgtgaaactcctatagaagagatgccgagaggaatgagtaaattaaatcatctacaacatctggatttctttgttgtgggcaagcacaaagagaatgggatcaaagaattgggaggactttcaaatcttcgtggtcgacttaaaattaggaacttggagaatgtttcccaaagtgatgaagcgtcggaggcaaggatgatggataaaaaacacattaatagtttatggttggaatggtctagatgtaataacaacagtaccaacttccaactagaaatagatgtgctttgcaagttacagcctcactttaacattgaatcgttgagaataaaaggctataaaggaaccagatttccagattggatgggaaattcttcctactgcaatatgatgagtctaaaattgcgtgattgtgacaactgtagtatgcttccttcacttggacaactaccttctctcaaggtccttaagattgcacgattgaataggctgaagactattgatgcaggtttttacaagaacgaagattgtcgttctgggacgccctttccctcccttgaatctctggccattcatcaaatgccttgttgggaggtgtggagttccttcgattcagaagcttttcctgtgcttgaaattcttgaaatacgtgactgccccaaactagagggaagtttgccgaatcaccttcctgctctgaaaacacttacaattagaaattgtgagctgcttggctcttctctcccaacggctcccgccattcaaagtttggagatacgtaaaagcaataaagtagcactgcatgcgtttcctctcttggtagaaactataaaagtagaaggaagcccaatggtggagtccatgatggaggccatcacaaacatccaaccaacttgtctccggtctttaacattaagggattgctcgtcagccgtgtcatttccgggtggtcgtttacctgaatcactgaagagtctgtatatctcggatcttaaaaaactggaattcccgacgcaacacaaacatgagttactggaaacactgtcaatagaaagcagttgtgattcactcacatctcttccattggttacctttccaaatctcagagatcttgaaatcagaaactgtgaaaatatggaatctcttttggtatcattctggagagaaggattgcctgcgcccaacttgattactttccaagtgtggggctctgacaagttgaagtcgttgcctgatgagatgagtactcttctcccaaagttagaacgtctcctcatatccaactgcccagaaattgagtcgtttccaaaacggggtatgccacctaacctgagaatagtttggattttcaattgtgagaaactactgagcagcctagcatggccatccatgggcatgcttactcatctctatgttgggggtcgatgtgatggcatcaagtccttccctaaggagggtttgctgcctccctcccttacgtatctgtatctaagtggattctcaaatctggagatgttggactgcacggggcttctccatctcacatccctgcaacaattaaccatagacggatgtcctttgctggaaaatatggtgggagaaaggcttcctgactctctaataaaattaaccataaagagttgtcctttgctgaaaaaacgatgccggaagaagcaccctcaaatttggcctaaaatttcccacatccctggcattaaggttgacaatagatggatttag

SEQ ID NO: 199 - protein, 1229 aa, Glycine max
MAAALVGGAFLSAFLDVLFDRLASPDFVDLILGKKLSKKLLRKLETTLRVVGAVLDDAEKKQITNTNVKHWLNALKDAVYEADDLLDHVFTKAATQNKVRNLFSRFSDRKIVSKLEDIVVTLESHLKLKESLDLKESAVENLSWKAPSTSLEDGSHIYGREKDREAIIKLLSEDNSDGSEVSVVPIVGMGGVGKTTLAQLVYNDENLKEKFDFDFKAWVCVSQEFDVLKVTKTIIQAVTGNPCKLNDLNLLHLELMDKLKDKKFLIVLDDVWTEDYVDWSLLKKPFQCGIIRRSKILLTTRSEKTASVVQTVQTYHLNQLSNEDCWSVFANHACLSLESNENTTLEKIGKEIVKKCDGLPLAAQSLGGMLRRKHDIGDWYNILNSDIWELSESECKVIPALRLSYHYLPPHLKRCFVYCSLYPQDYEFDKNELILLWMAEDLLKKPRKGRTLEEVGHEYFDDLVSRSFFQRSSTNRSSWPYGECFVMHDLMHDLAKSLGGDFYFRSEELGKETKINTKTRHLSFTKFNSSVLDNFDVVGRAKFLRTFLSIINFEAAPFNNEEAQCIIVSKLMYLRVLSFCDFQSLDSLPDSIGKLIHLRYLDLSHSSVETLPKSLCNLYNLQTLKLCSCRKLTKLPSDMCNLVNLRHLEIRETPIEEMPRGMSKLNHLQHLDFFVVGKHKENGIKELGGLSNLRGRLKIRNLENVSQSDEASEARMMDKKHINSLWLEWSRCNNNSTNFQLEIDVLCKLQPHFNIESLRIKGYKGTRFPDWMGNSSYCNMMSLKLRDCDNCSMLPSLGQLPSLKVLKIARLNRLKTIDAGFYKNEDCRSGTPFPSLESLAIHQMPCWEVWSSFDSEAFPVLEILEIRDCPKLEGSLPNHLPALKTLTIRNCELLGSSLPTAPAIQSLEIRKSNKVALHAFPLLVETIKVEGSPMVESMMEAITNIQPTCLRSLTLRDCSSAVSFPGGRLPESLKSLYISDLKKLEFPTQHKHELLETLSIESSCDSLTSLPLVTFPNLRDLEIRNCENMESLLVSFWREGLPAPNLITFQVWGSDKLKSLPDEMSTLLPKLERLLISNCPEIESFPKRGMPPNLRIVWIFNCEKLLSSLAWPSMGMLTHLYVGGRCDGIKSFPKEGLLPPSLTYLYLSGFSNLEMLDCTGLLHLTSLQQLTIDGCPLLENMVGERLPDSLIKLTIKSCPLLKKRCRKKHPQIWPKISHIPGIKVDNRWI

SEQ ID NO: 200 - DNA, 840 bp, Artificial Sequence
  cDNA
atgatgcaatggagcgcaatcctcatccgcacttgtttcagtggcagtggaggcgaggctctcacttgcgccacctccgagcaacagacacgacctgaattatgtttcttcttcagcgtgcgttcctcctggccatcgaccatctccgatggtgcctgtttggcactcgtatcggccgaacaaggcgccacggccgggcgcaataccttatccctgcgatcgatgatggctactgaagacatggcaacctcgacaagatcactacgatctcaagctacgaacgtggacgacgatgctaacgtttcgattgaaaacagagggatgaacccttcagtcctgaccaagctcggcgaatttgcttcgacgttgacggctggcaatacggcgaacaagttatggctgatggctgacgtggacccaaagtccgcgttcaagttgctgggtcttgacatgccaggggtccgctttatcgacaacccgaagatgttacagtggctcaagttcacaaaagcgtatttagacatgaaaaagtcggggtttggcgagacaagcgcacatgctcttctgtatgaaaaaattggaggacccgacttgtcactacttctcctaagcctgaaggacgctccggatgcgaacagcttggttcaaaaactgacgaattctcagtttggtatgtggcatgacgctcgaatcgaaccagaacagctcgcacaaacggtgttcaaaattcaagacgtcaggaaactacctaaaaacgacccaaaacttcaagttatcgatgactacgcgaagtatcacagaaagcaccggaagtttctgaacagcatcatgattatctga

SEQ ID NO: 201 - protein, 279 aa, Phytophthora sojae
MMQWSAILIRTCFSGSGGEALTCATSEQQTRPELCFFFSVRSSWPSTISDGACLALVSAEQGATAGRNTLSLRSMMATEDMATSTRSLRSQATNVDDDANVSIENRGMNPSVLTKLGEFASTLTAGNTANKLWLMADVDPKSAFKLLGLDMPGVRFIDNPKMLQWLKFTKAYLDMKKSGFGETSAHALLYEKIGGPDLSLLLLSLKDAPDANSLVQKLTNSQFGMWHDARIEPEQLAQTVFKIQDVRKLPKNDPKLQVIDDYAKYHRKHRKFLNSIMII

SEQ ID NO: 202 - DNA, 417 bp, Artificial Sequence
  cDNA
atgcgtctatcttttgtgctttctcttgtcgtggccattggctacgtcgtgacctgcaacgcaactgagtactccgacgaaaccaatatcgccatggtggaatctccagatctcgtccgtcgctcgctcaggaacggcgacattgccggtggaagatttcttcgagctcatgaagaggacgatgcgggggagcggaccttcagcgtgactgacctgtggaacaaggtggcggccaaaaagttggccaaggcgatgctggcggacccttcaaaggagcagaaagcgtacgagaagtgggcaaagaaggggtacagcctggataagatcaagaactggttggcaatcgcggaccccaagcagaaggggaagtacgaccgtatctacaacggatacacctttcacctgtatcagagctga

SEQ ID NO: 203 - protein, 138 aa, Phytophthora sojae
MRLSFVLSLVVAIGYVVTCNATEYSDETNIAMVESPDLVRRSLRNGDIAGGRFLRAHEEDDAGERTFSVTDLWNKVAAKKLAKAMLADPSKEQKAYEKWAKKGYSLDKIKNWLAIADPKQKGKYDRIYNGYTFHLYQS

SEQ ID NO: 204 - DNA, 3750 bp, Artificial Sequence
  cDNA
atggcagcagcactggtcggtggtgccttcctctctgcttttcttgatgtggttttcgacaggctggcttcacctgagtttgttgacttgatccgtggaaagaagcttagcaagaagttgcttcaaaagttggagaccactctcagagtggttggagctgtgcttgatgatgccgagaagaaacagatcacaaacaccaatgtcaaacactggctcaatgatctcaaacatgctgtctatgaagccgatgacttactcgaccatgttttcaccaaagctgccacccaaaacaaggtaagagacttgttttctcgcttttccgataggaagatcgttagtaagttggaggacatagttgtcacacttgagtctcatttaaaactcaaggagagtcttgatttgaaagagagtgcagtggagaacttgtcatggaaagctccatcaacatctctggaagatggatctcatatatatggtagggagaaagataaggaggccataatcaagttgttgtcggaggataacagtgacggtagagaagtgtctgtggttcctattgtgggcatgggtggggttggaaaaactactttggcccaattggtgtacaacgatgagaatttgaaacagatatttgattttgattttaaggcatgggtttgtgtttctcaagaatttgatgttctcaaggtcacaaaaactataatagaggcggtgactggaaaggcttgtaaattgaatgatctgaatctacttcatcttgaattgatggacaagctgaaagataaaaaattcttaattgttttggatgatgtttggacagaggattatgttgattggcgtcttcttaagaaaccatttaaccgtgggattattaggagaagtaaaattcttctaacaacccgcagtgaaaaaacagcatctgtagtccaaactgttcacacctatcatctaaaccaattgtcgaatgaagattgttggtcagtgtttgcgaaccatgcatgtctttccacggaatctaacgagaacacagcaacactagaaaaaattggaaaggagattgttaaaaagtgcaacggactgcctttagcagcagagtcgcttggaggcatgttgagaagaaagcatgacattggtgattggaataatattctcaatagtgacatttgggaactttctgaaagtgagtgtaaagttattccagcactgagacttagttatcattatctccctccacatttaaaacgatgctttgtttattgttcgttgtatccacaagattacgaatttgaaaaaaatgaattaatcttgttgtggatggctgaagatcttttgaagaaaccaaggaaaggtaggactttagaagaggttggtcatgagtattttgatgatttggtttcgagatcgtttttccaacgttcaagaacaagtagttggcctcatcgcaaatgttttgtgatgcatgacctcatgcatgatctagccacatcactcggtggagatttttattttagatcagaagaacttgggaaagaaacaaagatcaataccaagactcgtcatttgtcatttgccaaattcaattcttcagtcttggacaactttgatgttattggtagagcaaaatttctgagaaccttcttgtccattatcaattttgaagctgctccattcaacaatgaggaggcacaatgtatcataatgtcgaagcttatgtacttgagagttttatcattttgtgacttccaaagtctggattctttgcctgattcaataggtaaattgatccatctgcgctatttagatctctctttttcaagaatagaaacactgccaaagtcattgtgtaatttgtacaatctgcaaactttgaagttgtgtagttgcagaaagctgactaagttgcccagtgacatgcgcaatcttgttaacttgcgtcatcttggtattgcttatactcctataaaagagatgccgagaggaatgggtaaattaaatcatttacaacatctggatttctttgttgtgggcaagcacgaagagaatggaatcaaagaattgggaggactttcaaatcttcgtggtcagcttgaaattaggaagttggagaatgtttcccaaagtgatgaagcgttggaggcaaggatgatggataaaaaacacattaatagtttacagttggaatggtctggatgtaacaacaacagtaccaacttccaacttgaaatagatgtgctttgcaagttacagcctcactttaacattgaatcgttggaaataaaaggttatgaaggaaccagatttccagattggatgggaaattcttcctactgcaatatgattagtctaaaattgcgtgattgtcacaactgtagtatgcttccttcacttggacaactaccttctctcaaggaccttggaattgcacgattgaataggctgaagactattgatgcaggtttctacaagaatgaagaatgtcgttctgggacgtcctttccctcccttgaatctctgtccattgatgacatgccttgttgggaggtgtggagttccttcgattcagaagcttttcctgtgcttaacagtcttgaaatacgtgactgccccaaactagagggaagtttgccgaatcaccttcctgctctgacaaaacttgtgattagaaattgcgagctgcttgtctcttctctcccaacggctcccgccattcaaagtttggagatatgtaaaagcaataaagtagcactgcatgcgtttcctctcttggtagaaactatagaagtagaaggaagcccaatggtggagtccgtgatcgaggccatcactaacatccaaccaacttgtctccggtctttaacattaagggattgttcgtcagccgtgtcatttccgggtggtcgtttacctgaatcactgaagagtctgagtatcaaggatcttaaaaaactggaattcccgacgcaacacaaacatgagttactggaaacactgtcaatagaaagcagttgtgattcactcacatctcttccattggttacctttccaaatctcagatatctcagcatcgaaaagtgtgaaaatatggaatatcttttggtttcaggggcagagtcatttaagagtctgtgttatttgttaatttacaaatgccccaactttgtatcattctggagagaaggattgcctgcgcccaacttgattactttcagtgtttggggctctgacaagttgaagtcgttgcctgatgagatgagtactcttctcccaaagttagaagatctcaccatatccaactgcccagaaattgagtcctttccaaaacggggtatgccacctaacctgagaagagttgagattgtcaattgtgagaaactactgagcggcctagcatggccatccatgggcatgcttactcatctcaatgttgggggtccatgtgatggcatcaagtccttccctaaagagggtttgctgcctccctcccttacgtctctgtctctatatgacttgtcaaatctggagatgttggactgcacggggcttctccatctcacatccctgcaacaattacaaatttttggatgtccaaagctggagaatatggctggagaaagtcttcctttctctctaataaaattaaccatggtggaatgtcctttgctggaaaaacgatgccgcatgaagcaccctcaaatttggcctaaagtttcccacatccctggcattaaggttggcaatagatggatttag

SEQ ID NO: 205 - protein, 1249 aa, Glycine max
MAAALVGGAFLSAFLDVVFDRLASPEFVDLIRGKKLSKKLLQKLETTLRVVGAVLDDAEKKQITNTNVKHWLNDLKHAVYEADDLLDHVFTKAATQNKVRDLFSRFSDRKIVSKLEDIVVTLESHLKLKESLDLKESAVENLSWKAPSTSLEDGSHIYGREKDKEAIIKLLSEDNSDGREVSVVPIVGMGGVGKTTLAQLVYNDENLKQIFDFDFKAWVCVSQEFDVLKVTKTIIEAVTGKACKLNDLNLLHLELMDKLKDKKFLIVLDDVWTEDYVDWRLLKKPFNRGIIRRSKILLTTRSEKTASVVQTVHTYHLNQLSNEDCWSVFANHACLSTESNENTATLEKIGKEIVKKCNGLPLAAESLGGMLRRKHDIGDWNNILNSDIWELSESECKVIPALRLSYHYLPPHLKRCFVYCSLYPQDYEFEKNELILLWMAEDLLKKPRKGRTLEEVGHEYFDDLVSRSFFQRSRTSSWPHRKCFVMHDLMHDLATSLGGDFYFRSEELGKETKINTKTRHLSFAKFNSSVLDNFDVIGRAKFLRTFLSIINFEAAPFNNEEAQCIIMSKLMYLRVLSFCDFQSLDSLPDSIGKLIHLRYLDLSFSRIETLPKSLCNLYNLQTLKLCSCRKLTKLPSDMRNLVNLRHLGIAYTPIKEMPRGMGKLNHLQHLDFFVVGKHEENGIKELGGLSNLRGQLEIRKLENVSQSDEALEARMMDKKHINSLQLEWSGCNNNSTNFQLEIDVLCKLQPHFNIESLEIKGYEGTRFPDWMGNSSYCNMISLKLRDCHNCSMLPSLGQLPSLKDLGIARLNRLKTIDAGFYKNEECRSGTSFPSLESLSIDDMPCWEVWSSFDSEAFPVLNSLEIRDCPKLEGSLPNHLPALTKLVIRNCELLVSSLPTAPAIQSLEICKSNKVALHAFPLLVETIEVEGSPMVESVIEAITNIQPTCLRSLTLRDCSSAVSFPGGRLPESLKSLSIKDLKKLEFPTQHKHELLETLSIESSCDSLTSLPLVTFPNLRYLSIEKCENMEYLLVSGAESFKSLCYLLIYKCPNFVSFWREGLPAPNLITFSVWGSDKLKSLPDEMSTLLPKLEDLTISNCPEIESFPKRGMPPNLRRVEIVNCEKLLSGLAWPSMGMLTHLNVGGPCDGIKSFPKEGLLPPSLTSLSLYDLSNLEMLDCTGLLHLTSLQQLQIFGCPKLENMAGESLPFSLIKLTMVECPLLEKRCRMKHPQIWPKVSHIPGIKVGNRWI

SEQ ID NO: 206 - DNA, 3987 bp, Artificial Sequence
  cDNA
atggagattggcttagcagttggtggtgcatttctgtcttcagctttgaatgttctctttgataggcttgctcctcatggtgatctgctcaacatgtttcagaagaataagaatgatgttcgactcttaaagaagctgaaaatgactttggttggccttcaggttgtgttaagtgatgcagagaataaacaggcatcaaatcaacacgtgagccagtggtttaatgaacttcgaggtgctgtggatggcgctgaaaacttaatggaactagtcaattatgaggctttgaggcgtaaggtggaaggtcggcatcaaaatcttgcagaaacaagcaaccaacaagtaagtgaccgcaaactgaacttgagtgatgattattttctcgacataaaggagaagttggaagaaaccattgaaacattggaggatttgcaaaagcaaatcggtgaccttggcttacagaagcatttagatttgggtaagaaactagaaactagaacaccttcaacttctttggtcgatgaatctaaaatccttggtagaatgattgaaaaagagcgattgattgaccgtttattgtcaagtgattcaaatggagaaaatctgactgttgtccctattgttggaatggggggcgtgggcaagacaacacttgctaaaattgtttacaacgataagaaggtgaaagatcattttgacttgaaagcttggttttgtgtttcagaggcatatgatgctttcagaataacaaaaggattacttcaagaaattggatcattcgacctaaaggatgacaacaatcttaatcagctacaggtaaaattgaaggaaagcctaaagggaaaaagatttcttgttgtccttgatgacttgtggaatgatgactgtgatgagtgggatgacttgaaaaatctttttgtacaaggagctatgggaagtaagatccttgtgacgacacgtaaggaggatgttgccttgatgatgggtaatggggcaatcaatgtggagactctgtctgatgaagtctcttgggatctattcaaacagcattcattaaaaaacagggatccggaggaacatccagaacttgaagaggttggaaagcgaattgcagacaagtgcaaaggattgcctttagctctaaaggcacttgctggtattttatgccgcaaatcagaagtgtacgagtggaaaaacgtcttaagaagtgaaatatgggagctgccaaggcgtaagaatggtatattaccagagttgatgttgagctacaatgatcttcctgcacatttgaagcaatgttttgctttttgtgcaatatatcccaaagattataaattttgcaaagagcaagttattcacctgtggattgctaatggtctggtacaacagttgcattctggtaaccaatactttaatgagttgagatcaagatcattgttcgaaagggtcccagagtcttctgaaagatacggtgggaaattcttaatgcatgatcttgtcaatgatttggcccaaattgcatcttcaaaactttgtgtcaggttggaagagtgccaaggatctcatatattggaacaaagtcggcacacatcgtattcaatgggcagagatggtgactttgagaaattgaaaccgctctctaagtcagagcagctgaggacattgcttccaatctctatccagttcctttaccgccctaaactaagcaagagggtgctgcataacatattgccaagactaacttacttaagggcattatcattgtcatgttatgcgattgtggagcttccaaaagatttgtttatcaaatttaagctcctgagatttttggacctttctcaaacagagattacaaaattgcccgattctatctgtgcgttgtataacttggagacacttctcctgtcatcttgtgatgatcttgaggagctaccgctgcagatggagaagttgatcaacttgcggcaccttgacatcagcaacacttctcgcttgaagatgccgctacatctgagcaagttgaaaagcctccaagtgctagtgggagccaagtttctactaggtggcccctgtggttggagaatggaagatttgggtgaagcacattacatgtatggatctctatcaattttagaattgcaaaatgtggttgatagaagggaagctcagaaggcgaagatgagggataagaagaagaatcatgttgagaagttatcgttggagtggagtggaagtgatgcggacaattcacaaaccgaaagagacatacttgatgagctacgtccacacacaaaaataaaagaagtcgaaatctccggatatagagggacacaatttccaaattggctagctgatgattcgtttcttaagctgctagtacaattgtctcttagcaactgcaaggactgtttttccttgccagcgctaggacaacttccttgtttgaaattcctttccattagaaagatgcatcgaataacagaggtgacggaagaattctatggtagtccgtcctctgaaaagccttttaactctcttgagaagcttgaatttgcagagatgcctgagtggaagcagtggcacgtactagggatcggagagtttcctgcacttcgggacctttcaattgaagattgccccaagttggttggaaatttcctcgagaatctttgttctctgacgaaattgagaatctcaatatgtcccgaactcaatttggagacacccatccaactttcaagtctaaaatggtttgaagtttctggttcttctaaggctggatttatttttgatgaagctgaactgttcaccttaaatattttgaattgcaactctcttacctccttgcctattagcactctgccgagtacgttgaagacaatatggatatgtcgttgccggaaattgaaattggaggcaccagatagtagtaggatgatttcagacatgtttctggaggaattgagactggaggaatgtgattctatatcatcacctgagttggtcccaagagcacgcactttgactgtgaagaggtgccaaaaccttactaggtttttgattcctaatgggactgaaagactcgatatttggggttgtgagaatcttgaaatattttcggtggtatgtgggacccagatgacgtttttgaatatccactcttgcgcaaagctgaagcggctgccagaatgtatgcaggaactccttccatctcttaaggaactgcatctgtggaattgtccagaaatagagtcctttcctgatggaggattgcccttcaatttacaactcctcgtgatcaactattgcgagaaactggtgaacggtcgaaaggagtggcgtctacagagactccattctctcagagagttgttcatcaaccacgatggcagtgacgaagagattgttggtggtgagaattgggagttgccttgctctattcaaaggcttgtcatagtcaatctgaaaacattaagcagccaacttctcaaaagcctcacctctcttgaatctctagatattcgtaatttacctcaaattcggtcactgctggaacaagggcttccctcctctttttctaagctatatttatacagccatgatgagctccattcactacaaggtcttcagcacctcaattcggttcaaagtctattgatctggaattgccctaatctccaatctcttgcagaatcagcgctgccctcctgcctctctaagttgaccatcagggattgccctaatctccaatcccttcccaaatcagcatttccctcctccctctctgagctgaccatcgagaattgccctaatctccaatcccttccagtaaaagggatgccctcttccctctctatactatctatttacaaatgcccatttctcgaaccactcctagaatttgacaagggggagtactggccaaaaattgctcatattcctgaaatatatatcggtcgcactatgtttgactgtgaatgcctgtga

SEQ ID NO: 207 - protein, 1328 aa, Capsicum chinense
MEIGLAVGGAFLSSALNVLFDRLAPHGDLLNMFQKNKNDVRLLKKLKMTLVGLQVVLSDAENKQASNQHVSQWFNELRGAVDGAENLMELVNYEALRRKVEGRHQNLAETSNQQVSDRKLNLSDDYFLDIKEKLEETIETLEDLQKQIGDLGLQKHLDLGKKLETRTPSTSLVDESKILGRMIEKERLIDRLLSSDSNGENLTVVPIVGMGGVGKTTLAKIVYNDKKVKDHFDLKAWFCVSEAYDAFRITKGLLQEIGSFDLKDDNNLNQLQVKLKESLKGKRFLVVLDDLWNDDCDEWDDLKNLFVQGAMGSKILVTTRKEDVALMMGNGAINVETLSDEVSWDLFKQHSLKNRDPEEHPELEEVGKRIADKCKGLPLALKALAGILCRKSEVYEWKNVLRSEIWELPRRKNGILPELMLSYNDLPAHLKQCFAFCAIYPKDYKFCKEQVIHLWIANGLVQQLHSGNQYFNELRSRSLFERVPESSERYGGKFLMHDLVNDLAQIASSKLCVRLEECQGSHILEQSRHTSYSMGRDGDFEKLKPLSKSEQLRTLLPISIQFLYRPKLSKRVLHNILPRLTYLRALSLSCYAIVELPKDLFIKFKLLRFLDLSQTEITKLPDSICALYNLETLLLSSCDDLEELPLQMEKLINLRHLDISNTSRLKMPLHLSKLKSLQVLVGAKFLLGGPCGWRMEDLGEAHYMYGSLSILELQNVVDRREAQKAKMRDKKKNHVEKLSLEWSGSDADNSQTERDILDELRPHTKIKEVEISGYRGTQFPNWLADDSFLKLLVQLSLSNCKDCFSLPALGQLPCLKFLSIRKMHRITEVTEEFYGSPSSEKPFNSLEKLEFAEMPEWKQWHVLGIGEFPALRDLSIEDCPKLVGNFLENLCSLTKLRISICPELNLETPIQLSSLKWFEVSGSSKAGFIFDEAELFTLNILNCNSLTSLPISTLPSTLKTIWICRCRKLKLEAPDSSRMISDMFLEELRLEECDSISSPELVPRARTLTVKRCQNLTRFLIPNGTERLDIWGCENLEIFSVVCGTQMTFLNIHSCAKLKRLPECMQELLPSLKELHLWNCPEIESFPDGGLPFNLQLLVINYCEKLVNGRKEWRLQRLHSLRELFINHDGSDEEIVGGENWELPCSIQRLVIVNLKTLSSQLLKSLTSLESLDIRNLPQIRSLLEQGLPSSFSKLYLYSHDELHSLQGLQHLNSVQSLLIWNCPNLQSLAESALPSCLSKLTIRDCPNLQSLPKSAFPSSLSELTIENCPNLQSLPVKGMPSSLSILSIYKCPFLEPLLEFDKGEYWPKIAHIPEIYIGRTMFDCECL

SEQ ID NO: 208 - DNA, 474 bp, Artificial Sequence
  cDNA
atggcttacacagtttccagtgccaatcaattagtgtatttaggttctgtatgggctgatccattagagttacaaaatctgtgtacttcggcgttaggcaatcagtttcaaacacaacaggctagaactacggttcaacagcagttctctgatgtgtggaagactattccgaccgctacagttagatttcctgctactggtttcaaagttttccgatataatgccgtgctagattctctagtgtcggcacttctcggagcctttgatactaggaacaggataatagaagttgaaaatccgcaaaatcctacaactgccgagacgcttgatgcgacgaggcgggtagatgatgcgacggtggccattagggccagtataagtaacctcatgaatgagttagttcgtggcacgggaatgtacaatcaagctctgttcgagagcgcgagtggactaacctgggctacaactccttaa

SEQ ID NO: 209 - protein, 157 aa, Pepper mild mottle virus
MAYTVSSANQLVYLGSVWADPLELQNLCTSALGNQFQTQQARTTVQQQFSDVWKTIPTATVRFPATGFKVFRYNAVLDSLVSALLGAFDTRNRIIEVENPQNPTTAETLDATRRVDDATVAIRASISNLMNELVRGTGMYNQALFESASGLTWATTP

SEQ ID NO: 210 - DNA, 4143 bp, Artificial Sequence
  cDNA
atggagattggcttagcagttggaggtgcatttctatcttcagctttgaatgttctctttgataggcttgctcctcagggcgagctgctgaagatgtttcagagggacaaacatgatgttcgattattaaagaagctgagaattaccttgcttggccttcaggctgttctatgtgatgcagagaataagaaggcatcaaatcaatacgtgagccagtggcttattgagcttcaagatgctgtggacagtgctgaaaacttaatggaagaaatcaattatgaagttctgagagttaaggtggaaggtcagtatcaaaatcttggagaaacaagcaaccagcaagtaagtgacctcaacttgtgcttgagtgatgaatttttccttaacataaaggagaagttggaggacgccattgaaacattggaggagttggaaaagcaaatcggtcgccttgatctaacaaagtatcttgattcagataaacaagaaactagaagactttcaacttctgtggttgatgactctaatatctttggcaggcagaatgaaatagaggaattggtgggccgtttactatctgttgctgtaaatggcaaaaatttgacagtaattcctattgttggaatggctgggattggcaagacaacacttgctaaagccgtttacaacgatgagaaggtgaaataccattttgatttgaaagcttggttttgtgtgtctgaaccatatgatgctttcagaataacaaaagggttacttcaagaaataggttcatttgacttaaagatggataacaatcttaatcagctacaagtcaaattgaaggaaagcttaaagggcaaaaaatttcttattgttctggatgatgtttggaatgacaactataatgcatgggaggacttgaaaaatctttttgttcaaggaaatgcaggaagtacgatcattgtgacgacacgtaagaaaagtgttgccaagacgatgggtaatgagcaaattagcatggatactttgtctagtgatgtctcttggtctttattcaaaagacatgcatttgacaacatggatcctaaggaacatctagaacatgtagaagttgggaaagaaatcgtagctaagtgcaaaggattgcctttagctctgaagacgcttgctggcattttacgttccaaatcagagattgaagggtggaaacgtattttgagaagtgaagtatgggagctgccagacaatggcatattaccagtattgatgttgagctacagcgatcttcctgcacatttaaagcaatgtttttcctactgtgcaatatttccgaaagattatccatttcggaaaaaacaagtcattcagttgtggattgccaatggtctagtacaggggttgcaaaaatatgaaacaattgaagatttaggcaacctattctttctcgagttgcaatcaaggtcacttttcgaaagggtcccagagtcttctaaaaataatgcagagaaattcttaatgcatgaccttgtcaatgatttggcccaagttgcatcttcaaaactttgtgttaggttggaagagtaccaagagtctcatatgttgaaacgaagtcgacacatgtcctattcaatgggctatggtgactttgaaaagttgcaacctctctacaaattggagcagctcaggacattgcttccaatctacaatatcgagctatatggttcttctctaagcaagagggtgttgcttaacatattgccaagattaacatccttaagggcactatcattgtctcgttataatatcaaggagttaccagatgtcttgtttatcaaattaaaactcctaagattggtggacctttctttgacacagataatacagttaccggattcaatttgtgtgctctataacttggagatacttctcttgtcatcttgtgaatttcttaaggagttaccgcggcagatggagaagttgataaacttgcgtcaccttgacattagcggcagttctcgcttgatgatgccgctacatttgaccaagttgaaaagccttcatgtgttattgggagctaaatttcttgtaggtgatcgaagtggttcaagaatggaagatttgggtgaactatgcaacttgtatggaactctatcaattcaacagttggaaaatgtggcggatagaagggaagctttgaaagcaaacatgagcggtaaggaacatattgagaagttattattggagtggagtgtaagtattgcggacagttcacaaaatgaaagagacatacttggtgaggtacatccaaatccaaacataaaagaacttgagatcaacggatatagagggacaaactttccaaattggctagctgattattcattttctgagctggtggaattgtctctaagtaattgcaaggactgttattccttgccagcattaggccagcttccttctttgaaattccttgcaattcgagggatgcatcgaataatagaggtgactgaagaattttatggtggttcgtcctccaaaaagccttttaactctcttgaaaagcttgattttgcagagatgttggcgtgggagcagtggcatgtactaggaaatggggagttccctgtacttcaacacctttcaattgaagattgccccaagttgattggaaagttgcctgaaaatctttgttctctgacaaaattgacaatttcacattgtccgaaactcaatctggagacacctgtaaaatttccaagtctaaaaaagtttgaagttgaaggttctcctaaggttggagttctttttgatcatgcggaactgtttttgtctcaacttcagggaatgaaacagatagttgaattatacatcagtgattgtcactctcttacctccttgcctattagcagtctgccaaataccttgaaagaaataaggataaagcgttgtgagaaattgaaattggagtcgtcaattggtaagatgatttcaagaggaagtaacatgtttcttgaaagtttggaactggaagaatgtgattctatagatgatgtatcacctgagctggtcccatgtgcacgctatctgagagtagaaagttgtcaaagccttactagactttttattcccaatggggctgaagatctcaaaatcaataaatgtgagaatcttgaaatgctttcggtggctcagacgacgcccttgtgtaacttgtttattagcaactgcgagaagctgaagtcgctgccagaacatatgcaggagctctttccatctcttagagatctgtacctgaaaaattgtccagaaatagagtcctttcctgaaggaggattgcccttcaatttagaaatcctcgggatcagggattgctgtgaactggtgaatggccgaaaggagtggcatttacagggactcccctctctcacatatttagacatctaccatcacggttctgaaaactgggatattatgtgggagttgccttgctctattcgaagtcttaccatagacaatttgaaaacatttagcagccaagttctcaaaagcctcacctctcttgaatctctatgtacttctaatttacctcaaattcagtcactcttggaagaagggcttcccacatctcttttaaagctaacattatctgaccatggtgagctccattccctaccgaccgacggtcttcagcgcctcatttctcttcaacgtctacgcatcgataattgccctaatctccaatatgttccagaatcaacgtttccctcttccctctctgagctacatattagtagctgtagttttctccaatcgcttcgagaatcagcgctgtcctcctccctctctaatcttttcatctacagttgccctaatctccaatctctaatgctgccctcctccctctttgagctgcatatcattgattgccgtaatctccaatctcttccagaatcagcgctgcccccctccctctctaagttaatcatccttacatgccctaatctccaatctcttccagtaaaagggatgccctcttccatctcttttctgtctattattgactgcccattgctcaaaccaagtctagaatttgagaagggcgaatactggccaaatattgctcatattcccaacatagtgatcgattgtgaatgcctgtga

SEQ ID NO: 211 - protein, 1380 aa, Nicotiana sylvestris
MEIGLAVGGAFLSSALNVLFDRLAPQGELLKMFQRDKHDVRLLKKLRITLLGLQAVLCDAENKKASNQYVSQWLIELQDAVDSAENLMEEINYEVLRVKVEGQYQNLGETSNQQVSDLNLCLSDEFFLNIKEKLEDAIETLEELEKQIGRLDLTKYLDSDKQETRRLSTSVVDDSNIFGRQNEIEELVGRLLSVAVNGKNLTVIPIVGMAGIGKTTLAKAVYNDEKVKYHFDLKAWFCVSEPYDAFRITKGLLQEIGSFDLKMDNNLNQLQVKLKESLKGKKFLIVLDDVWNDNYNAWEDLKNLFVQGNAGSTIIVTTRKKSVAKTMGNEQISMDTLSSDVSWSLFKRHAFDNMDPKEHLEHVEVGKEIVAKCKGLPLALKTLAGILRSKSEIEGWKRILRSEVWELPDNGILPVLMLSYSDLPAHLKQCFSYCAIFPKDYPFRKKQVIQLWIANGLVQGLQKYETIEDLGNLFFLELQSRSLFERVPESSKNNAEKFLMHDLVNDLAQVASSKLCVRLEEYQESHMLKRSRHMSYSMGYGDFEKLQPLYKLEQLRTLLPIYNIELYGSSLSKRVLLNILPRLTSLRALSLSRYNIKELPDVLFIKLKLLRLVDLSLTQIIQLPDSICVLYNLEILLLSSCEFLKELPRQMEKLINLRHLDISGSSRLMMPLHLTKLKSLHVLLGAKFLVGDRSGSRMEDLGELCNLYGTLSIQQLENVADRREALKANMSGKEHIEKLLLEWSVSIADSSQNERDILGEVHPNPNIKELEINGYRGTNFPNWLADYSFSELVELSLSNCKDCYSLPALGQLPSLKFLAIRGMHRIIEVTEEFYGGSSSKKPFNSLEKLDFAEMLAWEQWHVLGNGEFPVLQHLSIEDCPKLIGKLPENLCSLTKLTISHCPKLNLETPVKFPSLKKFEVEGSPKVGVLFDHAELFLSQLQGMKQIVELYISDCHSLTSLPISSLPNTLKEIRIKRCEKLKLESSIGKMISRGSNMFLESLELEECDSIDDVSPELVPCARYLRVESCQSLTRLFIPNGAEDLKINKCENLEMLSVAQTTPLCNLFISNCEKLKSLPEHMQELFPSLRDLYLKNCPEIESFPEGGLPFNLEILGIRDCCELVNGRKEWHLQGLPSLTYLDIYHHGSENWDIMWELPCSIRSLTIDNLKTFSSQVLKSLTSLESLCTSNLPQIQSLLEEGLPTSLLKLTLSDHGELHSLPTDGLQRLISLQRLRIDNCPNLQYVPESTFPSSLSELHISSCSFLQSLRESALSSSLSNLFIYSCPNLQSLMLPSSLFELHIIDCRNLQSLPESALPPSLSKLIILTCPNLQSLPVKGMPSSISFLSIIDCPLLKPSLEFEKGEYWPNIAHIPNIVIDCECL

SEQ ID NO: 212 - DNA, 2814 bp, Artificial Sequence
  cDNA
atggcttatgctgctgttacttcccttatgagaaccatacatcaatcaatggaacttactggatgtgatttgcaaccgttttatgaaaagctcaaatctttgagagctattctggagaaatcctgcaatataatgggcgatcatgaggggttaacaatcttggaagttgaaatcgtagaggtagcatacacaacagaagatatggttgactcggaatcaagaaatgtttttttagcacagaatttggaggaaagaagcagggctatgtgggagatttttttcgtcctggaacaagcactagaatgcattgattccaccgtgaaacagtggatggcaacatcggacagcatgaaagatctaaaaccacaaactagctcgcttgtcagtttacctgaacatgatgttgagcagcccgagaatataatggttggccgtgaaaatgaatttgagatgatgctggatcaacttgctagaggaggaagggaactagaagttgtctcaatcgtagggatgggaggcatcgggaaaacaactttggctacaaaactctatagtgatccgtgcattatgtctcgatttgatattcgtgcaaaagcaactgtttcacaagagtattgtgtgagaaatgtactcctaggccttctttctttgacaagtgatgaacctgatgatcagctagcggaccgactgcaaaagcatctgaaaggcaggagatacttggtagtcattgatgacatatggactacagaagcttgggatgatataaaactatgtttcccagactgttataatggaagcagaatactcctgactactcggaatgtggaagtggctgaatatgctagttcaggtaagcctcctcatcacatgcgcctcatgaattttgacgaaagttggaatttactacacaaaaagatctttgaaaaagaaggttcttattctcctgaatttgaaaatattgggaaacaaattgcattaaaatgtggaggattacctctagcaattactgtgattgctggacttctctccaaaatgggtcaaagattagatgagtggcaaagaattggggaaaatgtaagttcggtcgttagcacagatcctgaagcacaatgcatgagagtgttggctttgagttaccatcacttgccttctcacctaaaaccgtgttttctgtattttgcaattttcacagaggatgaacagatttctgtaaatgaacttgttgagttatggcctgtagagggatttttgaatgaagaagagggaaaaagcatagaagaggtggcaacaacatgtataaacgaacttatagatagaagcttaattttcatccacaattttagttttcgtggaacaatagaaagttgtggaatgcatgatgtgacccgtgaactctgtttgagggaagctcgaaacatgaattttgtgaatgttatcagaggaaagagtgatcaaaattcatgtgcacaatccatgcagcgttcctttaagagtcgaagtcggatcagaatccataaggtggaagaattggcttggtgtcgtaacagtgaggctcattctattatcatgttgggtggattcgaatgcgtcacactggaattgtctttcaagctagtaagagtactagatcttggtttgaatacatggccaatttttcccagtggagtactttctctaattcatttgagatacctatctttgcgttttaatccttgcttacagcagtatcaaggatcgaaagaagctgttccctcatcaataatagacattcctctatcgatatcaagcctatgctatctgcaaacttttaaacttaaccttccatttcccagttattatcctttcatattaccatcggaaattttgacgatgccacaattgaggacgctgtgtatgggctggaattacttgcggagtcatgagcctacagagaacagattggttttgaaaaatttgcaatgcctcaatcaattgaaccctcggtattgtacagggtctttttttagactatttcccaatttaaagaagttgcaagtatttggcgtcccagaagactttcgcaatagccaggacctgtatgattttcgctacttatatcagctcgaagaattgacatttcgtttatattatccatatgctgcttgctttctaaaaaacactgcaccttcaggttctacgcaagatcctctgaggtttcagacggaaatattgcacaaagagattgatttcgggggaactgcacctccaactttactcttacctcctccggatgcttttccacaaaaccttaagagtttaacttttaggggagaattctctgtggcatggaaggatttgagcattgttggtaaattacccaaactcgaggtccttatactatcatggaatgccttcataggcaaggagtgggaagtagttgaggaagggtttcctcacttgaagttcttgtttctggatgatgtatacattcgatactggagagctagtagtgatcactttccgtaccttgaacgagttattcttagagattgccgtaatttggattcaatccctcgagattttgcagatataaccacactagctcttattgatatagattactgtcaacaatctgttgtgaattccgccaagcaaattcaacaggacattcaagacaactatggaagctctatcgaggtccatactcgtcatcttttcattcccaagagtgtgacaacagttgaagatgatgatgatagtgtgacaacagatgaagatgatgatgatgatgactttgagaaagaagttgcttcttgccgcaataatgtcgagtag

SEQ ID NO: 213 - protein, 937 aa, Solanum tuberosum
MAYAAVTSLMRTIHQSMELTGCDLQPFYEKLKSLRAILEKSCNIMGDHEGLTILEVEIVEVAYTTEDMVDSESRNVFLAQNLEERSRAMWEIFFVLEQALECIDSTVKQWMATSDSMKDLKPQTSSLVSLPEHDVEQPENIMVGRENEFEMMLDQLARGGRELEVVSIVGMGGIGKTTLATKLYSDPCIMSRFDIRAKATVSQEYCVRNVLLGLLSLTSDEPDDQLADRLQKHLKGRRYLVVIDDIWTTEAWDDIKLCFPDCYNGSRILLTTRNVEVAEYASSGKPPHHMRLMNFDESWNLLHKKIFEKEGSYSPEFENIGKQIALKCGGLPLAITVIAGLLSKMGQRLDEWQRIGENVSSVVSTDPEAQCMRVLALSYHHLPSHLKPCFLYFAIFTEDEQISVNELVELWPVEGFLNEEEGKSIEEVATTCINELIDRSLIFIHNFSFRGTIESCGMHDVTRELCLREARNMNFVNVIRGKSDQNSCAQSMQRSFKSRSRIRIHKVEELAWCRNSEAHSIIMLGGFECVTLELSFKLVRVLDLGLNTWPIFPSGVLSLIHLRYLSLRFNPCLQQYQGSKEAVPSSIIDIPLSISSLCYLQTFKLNLPFPSYYPFILPSEILTMPQLRTLCMGWNYLRSHEPTENRLVLKNLQCLNQLNPRYCTGSFFRLFPNLKKLQVFGVPEDFRNSQDLYDFRYLYQLEELTFRLYYPYAACFLKNTAPSGSTQDPLRFQTEILHKEIDFGGTAPPTLLLPPPDAFPQNLKSLTFRGEFSVAWKDLSIVGKLPKLEVLILSWNAFIGKEWEVVEEGFPHLKFLFLDDVYIRYWRASSDHFPYLERVILRDCRNLDSIPRDFADITTLALIDIDYCQQSVVNSAKQIQQDIQDNYGSSIEVHTRHLFIPKSVTTVEDDDDSVTTDEDDDDDDFEKEVASCRNNVE

SEQ ID NO: 214 - DNA, 3159 bp, Solanum tuberosum
atggcttatgctgctgttacttcccttatgagaaccatacatcaatcaatggaacttactggatgtgatttgcaaccgttttatgaaaagctcaaatctttgagagctattctggagaaatcctgcaatataatgggcgatcatgaggggttaacaatcttggaagttgaaatcgtagaggtagcatacacaacagaagatatggttgactcggaatcaagaaatgtttttttagcacagaatttggaggaaagaagcagggctatgtgggagatttttttcgtcctggaacaagcactagaatgcattgattccaccgtgaaacagtggatggcaacatcggacagcatgaaagatctaaaaccacaaactagctcgcttgtcagtttacctgaacatgatgttgagcagcccgagaatataatggttggccgtgaaaatgaatttgagatgatgctggatcaacttgctagaggaggaagggaactagaagttgtctcaatcgtagggatgggaggcatcgggaaaacaactttggctacaaaactctatagtgatccgtgcattatgtctcgatttgatattcgtgcaaaagcaactgtttcacaagagtattgtgtgagaaatgtactcctaggccttctttctttgacaagtgatgaacctgatgatcagctagcggaccgactgcaaaagcatctgaaaggcaggagatacttggtagtcattgatgacatatggactacagaagcttgggatgatataaaactatgtttcccagactgttataatggaagcagaatactcctgactactcggaatgtggaagtggctgaatatgctagttcaggtaagcctcctcatcacatgcgcctcatgaattttgacgaaagttggaatttactacacaaaaagatctttgaaaaagaaggttcttattctcctgaatttgaaaatattgggaaacaaattgcattaaaatgtggaggattacctctagcaattactgtgattgctggacttctctccaaaatgggtcaaagattagatgagtggcaaagaattggggaaaatgtaagttcggtcgttagcacagatcctgaagcacaatgcatgagagtgttggctttgagttaccatcacttgccttctcacctaaaaccgtgttttctgtattttgcaattttcacagaggatgaacagatttctgtaaatgaacttgttgagttatggcctgtagagggatttttgaatgaagaagagggaaaaagcatagaagaggtggcaacaacatgtataaacgaacttatagatagaagcttaattttcatccacaattttagttttcgtggaacaatagaaagttgtggaatgcatgatgtgacccgtgaactctgtttgagggaagctcgaaacatgaattttgtgaatgttatcagaggaaagagtgatcaaaattcatgtgcacaatccatgcagcgttcctttaagagtcgaagtcggatcagaatccataaggtggaagaattggcttggtgtcgtaacagtgaggctcattctattatcatgttgggtggattcgaatgcgtcacactggaattgtctttcaagctagtaagagtactagatcttggtttgaatacatggccaatttttcccagtggagtactttctctaattcatttgagatacctatctttgcgttttaatccttgcttacagcagtatcaaggatcgaaagaagctgttccctcatcaataatagacattcctctatcgatatcaagcctatgctatctgcaaacttttaaacttaaccttccatttcccagttattatcctttcatattaccatcggaaattttgacgatgccacaattgaggacgctgtgtatgggctggaattacttgcggagtcatgagcctacagagaacagattggttttgaaaaatttgcaatgcctcaatcaattgaaccctcggtattgtacagggtctttttttagactatttcccaatttaaagaagttgcaagtatttggcgtcccagaagactttcgcaatagccaggacctgtatgattttcgctacttatatcagctcgaagaattgacatttcgtttatattatccatatgctgcttgctttctaaaaaacactgcaccttcaggttctacgcaagatcctctgaggtttcagacggaaatattgcacaaagagattgatttcgggggaactgcacctccaactttactcttacctcctccggatgcttttccacaaaaccttaagagtttaacttttaggggagaattctctgtggcatggaaggatttgagcattgttggtaaattacccaaactcgaggtccttatactatcatggaatgccttcataggcaaggagtgggaagtagttgaggaagggtttcctcacttgaagttcttgtttctggatgatgtatacattcgatactggagagctagtagtgatcactttccgtaccttgaacgagttattcttagagattgccgtaatttggattcaatccctcgagattttgcagatataaccacactagctcttattgatatagattactgtcaacaatctgttgtgaattccgccaagcaaattcaacaggacattcaagacaactatggaagctctatcgaggtccatactcgtcatcttttgtaagacatcttcttccttgctttacaacaataattaactcatcatcatagtaaactcgataataatctggataatagccttagtaagtcaaattgcaccaattcaacaaaagttcttgatgctgtcattgtgtttgatttgaatccttccaatattgtgtaacttgttatacttgcatgttcattcttgattttgggaagtgtaacatttcatttttcatcttttgtggctagcattcccaagagtgtgacaacagttgaagatgatgatgatagtgtgacaacagatgaagatgatgatgatgatgactttgagaaagaagttgcttcttgccgcaataatgtgtaagttcttatacctgcatgctcattcttgctataatgttctcttgttccttaattatgggacatctgacatattattttccatgttttgcgtcttttatttttctgcagcgagtag

SEQ ID NO: 215 - DNA, 714 bp, Artificial Sequence
  cDNA
atgtcagcaccagctagcacaacacaggccacagggtcaactacctcaactaccgcaaaaactgcaggcgcaactcctgccacagcttcaggactgttcaccatcccggatggggatttctttagtacagcccgcgctatagtagccagcaatgccgttgcaacaaatgaggacctcagcaagattgaggctatctggaaggacatgaaggtgcccacagacactatggcacaggctgcctgggacttagtcagacactgcgctgacgtgggctcatctgctcaaacagaaatgatagatacaggtccctattccaacggcatcagcagagccagactggcagcagcaattaaagaggtgtgcatacttaggcaattttgcatgaagtatgccccagtggtatggaactggatgctgactaacaacagtccacctgctaactggcaagcacaaggcttcaagcctgagcacaaattcgctgcattcgacttcttcaatggagtcaccaacccagctgccatcatgcccaaagaggggctcatccggccaccgtctgaagctgaaatgaatgctgcccaaactgctgcctttgtgaagattacgaaggccagggcacaatccaacgactttgccagcctagatgcagctgtcactcgaggtcgtatcactggaacaacaaccgctgaggctgttgtcactctcccaccaccataa

SEQ ID NO: 216 - protein, 237 aa, Potato virus X
MSAPASTTQATGSTTSTTAKTAGATPATASGLFTIPDGDFFSTARAIVASNAVATNEDLSKIEAIWKDMKVPTDTMAQAAWDLVRHCADVGSSAQTEMIDTGPYSNGISRARLAAAIKEVCILRQFCMKYAPVVWNWMLTNNSPPANWQAQGFKPEHKFAAFDFFNGVTNPAAIMPKEGLIRPPSEAEMNAAQTAAFVKITKARAQSNDFASLDAAVTRGRITGTTTAEAVVTLPPP

SEQ ID NO: 217 - DNA, 2817 bp, Artificial Sequence
  cDNA
atggcttatgctgctgttacttcccttatgagaaccatacatcaatcaatggaacttactggatgtgatttgcaaccgttttatgaaaagctcgaatctttaagagctattctggagaaatcctgcaatgtaacgggcgatcatgaggagttaacaatcttggaagttgaaatcttagaggtagcatacacaacagaagatatggttgactcggaatcaagaagtgtttttttagcacagaatttggaggaaagaaacagggctatgtgggagatttttttcgtcttggaacaagcactagaatgcattgattccaccgtgaaacagtggatggcaacatcggacagcatgaaagatctaaaaccacaaactagctcacttgtcagtttacctgaccatgcttttgagcagcctgagaatataatggttggccgtgaaaatgaatttgagatgatgctggatcaacttgttagaggaggaagggaactagaagttgtctcaatcgtagggatgggaggtatcgggaaaacaactttggctacaaaactctatagtgatccttacattatgtctcgatttgatattcgtgcaaaagcaactgtttcacaagagtattgtgtgagaaatgtactcctaggccttctttctttgacaagtgatgaacctgatgatcaactagcggaccgactgcaaaagcatctgaaaggcaggagatacttggtagtcattgatgacatatggactacaaaagcttgggatggtataaaactatgtttcccagactgttataagggaagcagaatactcctgactactcggaatgtggaagtggctgaatatgctagttcaggtaagcctcctcatcacatgcgcctcatgaattttgacgaaagttggaatttactacacaaaaagatctttgaaaaagaaggttcttattctcctgaatttgaaaatattgggaaacaaattgcattaaaatgtggaggattacctctagcaattactgtgattgctggacttctctccaaaatcagtaaaacattggatgagtggcaaaatgttgcggagaatgtaagttcggtggtaagcacagatcttgaagcaaaatgcatgagagtgttggctttgagttaccatcacttgccttctcacctaaaaccgtgttttctatattttgcaattttcgcagaggatgaacggatttctgtaactaaacttgttgagttatgggctgtagaggggtttttgaatgaagaagagggaaaaagcatagaagaggtggcagaaacatgtataaacgagcttgtagatagaagtctaatttctatccacaatttgagttttgatgggaaaatagaaagttgtggaatgcatgatgtgacccgtgaactctgtttgagggaagctcgaaacatgaattttgtaaatgttatcagaggaaagagtgatcaaaattcatgtgcacaatccatgcagcgttcctttaagagtcgaagtcggatcagaatccataagctggaagaattggcttggtgtcgtaacagtgaggctcattctattatcatgttgggtggattcgaatgcgtcacactggaattgtctttcaagctagtaagagtactagatcttggtttgaatacatggccaatttttcccagtggagtactttctctaattcatttgagatacctatctttgcgttttaatccttgcttacagcagtatcaaggatcgaaagaagctgttccctcatcaataatagacattcctctatcgatatcaagcctatgctatctgcaaacttttaaacttaaccttccatttcccagttattatcctttcatattaccatcggaaattttgacgatgccacaattgaggacgctgtgtatggactggaattacttgcggagtcatgagcctacagagaacagattggttttgaaaaatttgcaatgcctcaatcaattgaaccctcggtattgtacagggtctttttttagactatttcccaatttaaagaagttgcaagtatttggcgtcccagaagactttcgcaatagccaggacctgtatgattttcgctacttatatcagctcgaagaattgacatttcgtttatattatccatatgctgcttgctttctaaaaaacactgcaccttcaggttctactccgcaagatcctctgaggtttcagacggaaatattgcacaaagagattgatttcgggggaactgcacctccaactttactcttacctcctccggatgcttttccacaaaaccttaagagtttaacttttaggggagaattctctgtggcatggaaggatttgagcattgttggtaaattacccaaactcgaggtccttatactatcatggaatgccttcataggcaaggagtgggaagtagttgaggaagggtttcctcacttgaacttcttgtttctggatgatgtatacattcgatactggagagctagtagtgatcactttccgtaccttgaacgacttattcttagagattgccgtaatttggattcaatccctcgagattttgcagatataaccacactagctcttattgatatagattactgtcaacaatctgttgtgaattccgccaagcaaattcaacaggacattcaagacaactatggaagctctatcgaggtccatactcgtcatcttttcattcccaagagtgtgacaacagttgaagatgatgatgatagtgtgacaacagatgaagatgatgatgatgatgactttgagaaagaagttgcttcttgccgcaataatgtcgagtag

SEQ ID NO: 218 - protein, 938 aa, Solanum acaule
MAYAAVTSLMRTIHQSMELTGCDLQPFYEKLESLRAILEKSCNVTGDHEELTILEVEILEVAYTTEDMVDSESRSVFLAQNLEERNRAMWEIFFVLEQALECIDSTVKQWMATSDSMKDLKPQTSSLVSLPDHAFEQPENIMVGRENEFEMMLDQLVRGGRELEVVSIVGMGGIGKTTLATKLYSDPYIMSRFDIRAKATVSQEYCVRNVLLGLLSLTSDEPDDQLADRLQKHLKGRRYLVVIDDIWTTKAWDGIKLCFPDCYKGSRILLTTRNVEVAEYASSGKPPHHMRLMNFDESWNLLHKKIFEKEGSYSPEFENIGKQIALKCGGLPLAITVIAGLLSKISKTLDEWQNVAENVSSVVSTDLEAKCMRVLALSYHHLPSHLKPCFLYFAIFAEDERISVTKLVELWAVEGFLNEEEGKSIEEVAETCINELVDRSLISIHNLSFDGKIESCGMHDVTRELCLREARNMNFVNVIRGKSDQNSCAQSMQRSFKSRSRIRIHKLEELAWCRNSEAHSIIMLGGFECVTLELSFKLVRVLDLGLNTWPIFPSGVLSLIHLRYLSLRFNPCLQQYQGSKEAVPSSIIDIPLSISSLCYLQTFKLNLPFPSYYPFILPSEILTMPQLRTLCMDWNYLRSHEPTENRLVLKNLQCLNQLNPRYCTGSFFRLFPNLKKLQVFGVPEDFRNSQDLYDFRYLYQLEELTFRLYYPYAACFLKNTAPSGSTPQDPLRFQTEILHKEIDFGGTAPPTLLLPPPDAFPQNLKSLTFRGEFSVAWKDLSIVGKLPKLEVLILSWNAFIGKEWEVVEEGFPHLNFLFLDDVYIRYWRASSDHFPYLERLILRDCRNLDSIPRDFADITTLALIDIDYCQQSVVNSAKQIQQDIQDNYGSSIEVHTRHLFIPKSVTTVEDDDDSVTTDEDDDDDDFEKEVASCRNNVE

SEQ ID NO: 219 - DNA, 3162 bp, Solanum acaule
atggcttatgctgctgttacttcccttatgagaaccatacatcaatcaatggaacttactggatgtgatttgcaaccgttttatgaaaagctcgaatctttaagagctattctggagaaatcctgcaatgtaacgggcgatcatgaggagttaacaatcttggaagttgaaatcttagaggtagcatacacaacagaagatatggttgactcggaatcaagaagtgtttttttagcacagaatttggaggaaagaaacagggctatgtgggagatttttttcgtcttggaacaagcactagaatgcattgattccaccgtgaaacagtggatggcaacatcggacagcatgaaagatctaaaaccacaaactagctcacttgtcagtttacctgaccatgcttttgagcagcctgagaatataatggttggccgtgaaaatgaatttgagatgatgctggatcaacttgttagaggaggaagggaactagaagttgtctcaatcgtagggatgggaggtatcgggaaaacaactttggctacaaaactctatagtgatccttacattatgtctcgatttgatattcgtgcaaaagcaactgtttcacaagagtattgtgtgagaaatgtactcctaggccttctttctttgacaagtgatgaacctgatgatcaactagcggaccgactgcaaaagcatctgaaaggcaggagatacttggtagtcattgatgacatatggactacaaaagcttgggatggtataaaactatgtttcccagactgttataagggaagcagaatactcctgactactcggaatgtggaagtggctgaatatgctagttcaggtaagcctcctcatcacatgcgcctcatgaattttgacgaaagttggaatttactacacaaaaagatctttgaaaaagaaggttcttattctcctgaatttgaaaatattgggaaacaaattgcattaaaatgtggaggattacctctagcaattactgtgattgctggacttctctccaaaatcagtaaaacattggatgagtggcaaaatgttgcggagaatgtaagttcggtggtaagcacagatcttgaagcaaaatgcatgagagtgttggctttgagttaccatcacttgccttctcacctaaaaccgtgttttctatattttgcaattttcgcagaggatgaacggatttctgtaactaaacttgttgagttatgggctgtagaggggtttttgaatgaagaagagggaaaaagcatagaagaggtggcagaaacatgtataaacgagcttgtagatagaagtctaatttctatccacaatttgagttttgatgggaaaatagaaagttgtggaatgcatgatgtgacccgtgaactctgtttgagggaagctcgaaacatgaattttgtaaatgttatcagaggaaagagtgatcaaaattcatgtgcacaatccatgcagcgttcctttaagagtcgaagtcggatcagaatccataagctggaagaattggcttggtgtcgtaacagtgaggctcattctattatcatgttgggtggattcgaatgcgtcacactggaattgtctttcaagctagtaagagtactagatcttggtttgaatacatggccaatttttcccagtggagtactttctctaattcatttgagatacctatctttgcgttttaatccttgcttacagcagtatcaaggatcgaaagaagctgttccctcatcaataatagacattcctctatcgatatcaagcctatgctatctgcaaacttttaaacttaaccttccatttcccagttattatcctttcatattaccatcggaaattttgacgatgccacaattgaggacgctgtgtatggactggaattacttgcggagtcatgagcctacagagaacagattggttttgaaaaatttgcaatgcctcaatcaattgaaccctcggtattgtacagggtctttttttagactatttcccaatttaaagaagttgcaagtatttggcgtcccagaagactttcgcaatagccaggacctgtatgattttcgctacttatatcagctcgaagaattgacatttcgtttatattatccatatgctgcttgctttctaaaaaacactgcaccttcaggttctactccgcaagatcctctgaggtttcagacggaaatattgcacaaagagattgatttcgggggaactgcacctccaactttactcttacctcctccggatgcttttccacaaaaccttaagagtttaacttttaggggagaattctctgtggcatggaaggatttgagcattgttggtaaattacccaaactcgaggtccttatactatcatggaatgccttcataggcaaggagtgggaagtagttgaggaagggtttcctcacttgaacttcttgtttctggatgatgtatacattcgatactggagagctagtagtgatcactttccgtaccttgaacgacttattcttagagattgccgtaatttggattcaatccctcgagattttgcagatataaccacactagctcttattgatatagattactgtcaacaatctgttgtgaattccgccaagcaaattcaacaggacattcaagacaactatggaagctctatcgaggtccatactcgtcatcttttgtaagacatcttcttccttgctttacaacaataattaactcatcatcatagtaaactcgataataatctggataatagccttagtaagtcaaattgcaccaattcaacaaaagttcttgatgctgtcattgtgtttgatttgaatccttccaatattgtgtaacttgttatacttgcatgttcattcttgattttgggaagtgtaacatttcatttttcatcttttgtggctagcattcccaagagtgtgacaacagttgaagatgatgatgatagtgtgacaacagatgaagatgatgatgatgatgactttgagaaagaagttgcttcttgccgcaataatgtgtgagttcttatacctgcatgctcattcttgctataatgttctcttgttccttaattatggggcatctaacatattattttccattttttgcgccttttttttttctgcagcgagtag

SEQ ID NO: 220 - DNA, 5238 bp, Artificial Sequence
  cDNA
atggaaatcgtaactgctattttgagcccagtcgcagaacacttgatgatactgccagttgcgcgacagattggatatttgttttactataggcgcaacatcaggtctttggaaaatgaaaataagaagctggagggtatcagaagcggggtgcagcacagaaaggatgctgaatggagaaacttacaagtcatgccaccccatgtcgagaattggttaaaggatgttaatgaaactactgctgaggtggcggttttactacgacgtagagctgaggttgaaagaggttgcttctacggttggtgtccaaacttgaagtcacgtcactcgctgagcaggaaagctaagaaaattgaacaggctatgattggtcttcaagatgaaggcacacgttatgctccttcctcctgtccagcaccacttgcagttacagtgatacacagtgatgagtttgactctagaaaacagaaggaggaagaggtcatgacagctttgaaagatgaggggatcactattgttgggatatgtggtatgggtggtgttggtaaaacaacactggctgagaaagtaagagcaagggcaaaacaagaaaggttgtttgattatgttgttgtgctaactatcagtcaacaacaaccagacattaaaaaaatacagcgcgagatcgccgaaggagtcggtctatcattagagggggacgatttgttggagcgtggagatcggctgcgttcaaggttaatgcagaaggacagtcgcgtccttgtaattttggatgatgtttggaagaaggttgatctaaagagggttggaattcccagtggtagcgatcgcaactactggtgcaaagtgatattgacgacgcgtctccgagatgtttgtgacgatatggaggctaaaaagaaagtacatgttgaaatcttatgtgaaaatgaagcatggctcctttttaggcagaaagccggtaattcagctgatgatctctctcttcctgatatagcagaagccgttgccaaagaatgcaaggggctgccacttgcaattgttactgttgcaggagcactaaagggtaaaaccaagcgttcatgggaggatgcccttttagaattaaaaaaagcagcaccaagaaatattcgaggagtgcttgcagatgtgtatcaacctctgaagataagctataatcacttagggagtgatgaagccaaggatgcctttttgctttgttccttgtttgaggaagatagtaatatttggactgaagaattacttagatacggaatggggcttggcatcttttcggaactcgaaaatttagaatgtgcaagaaatagggtgtctaatctgttagaaacattgaaaaattgtttcttgttatcccaagttccaggcaaagattatgtcaaaatgcatgatgtggtccgggacatggctatacatattgcatctgagggtaaccatatttttttggtgagccacaatgtgaactcaaaagagttcccaagaaaagactcttacaagcaatacagtcatatgtcaattgttgcaaataaatttgatgcgcgtcccagaccaatatcttgcccacgattgaagcttctgatgttaaaactccgtttcgaagagggtttcaaattacaggatgatttttttgatggaatgagtgaactcagtgtcataaaactgagtggatatgatcgaaactccattctgccctttccatcatccattcagaggttgtcaaatctgagcacgctttggctgagtaatctaaggttggatgacgtgtccattattggggaacttgtcactttagaaattctcagcatcagaggttctgacttacaggagcttccagtggagatcggaaacttggccaatctaactatgttagagtattggaatactggttacagaaaccgtatgaggatttcaccaggggtcttatcaagactagttcgattggaggaactacatatggtgggagtagaagattgtagttactccaccttgagggagctggaatcgttatcgagattgactgcactgacattagatggatgttccaaagatgtgatttacagtaacttgggcctttcctccaagttgacacggtacgctcttaaaatgggtagacactacacgtttacttcattcatgcaaacttacaacaaggctatctatctagacgtcaccaagggcaccccattgggtgattggatccgcctcctgttgaggaatagcgaatgtgtaagttcaagcggaaaggggtccaagaatgtagtgttcgagttgcagaatgtgaaagatctcaggctgtctttttgtgattcattgaatatccactgtcagaataatattccattccccaaacttgaaaggctgaaagtaaatgggtgtgatcatctacggcatcttttttgtgtgtccttggcttgccctgatgaggggacctctcgaaggacacacatcagacctgacgtaatcaagttccccaatttatattacttggaactgggatttctgaaatgcttcacacactttttcagtgacaccgttgagggcattgagttccctctgttacggaaaatgcatttctggagtttacaaaagttccaaaatttctggcctagagtcaacaatgctatcaccgactcaaatcctctttttaatgaaaaggtttcttgtcccaacctggaattgctacgactctgtgaggccaacagcttaactgctctatgctctcaccaacttccaactgcctacttcagcaaacttgtaaccttgaatgtacttaggtgtggaaaactgagaaacttgatgtctccatcagtggccagaggtcttctgaatctccgaatattactattagaagactgtgaatcaatggaagaagtgatcacagaagaggaacaacaaggagatgaaatcatgtgtaatgaacccttatttccccaattggaagagctgggacttgaaaatctgccaaatctgaggcatttcattttgacaaagcaagctcttgaatttccattcctcagagaagtgcagattcgtaactgccctgaaacgaagatatttgtccaacagagatctgtcagtacatcaagtctcaaaagtgtgaacaatgatgatgagttgaaagttgttgatctcaacaaagcgatgtttaattctaaggtttcttgtcccaacctggaagtgctacgactctataaggctaacagcataagtgctctatgctctcaccaacttccaactgcctacttcagcaaacttaaggaactaggagtagggaattgtggaaaattgagacacttgatgtctccatcagtggccagaggtcttctgaatctccgaaaactatggataggagaatgccaatcaatggaagaagtgatcacagaagaggaacaacaaggagatgaaatcatgtgtaatgaacccttatttccccaattggaagagctgggacttgaaaatctgccaaatctgaggcatttcattttgacaaagcaagctcttgaatttccattcctcagagaagtgctgattcgtaactgccctgaaacgaagatatttgtccaacagagatctgtcagtacatcaagtctcaaaagtgtgaacaatgatgatgagttgaaagttgttgatctcaacaaagcgatgtttaattctaaggtttcttgtcccaacctggaagtgctactactctataaggctaacagcataagtgctctatgctctcaccaacttccaactgcctacttcagcaaacttaaggaactaggagtatggaattgtggaaaattgagacacttgatgtctccatcagtggccagaggtcttctgaatctccgaaaactatggatacgagaatgccaatcaatggaagaagtgatcacagaagaggaacaacaaggagatgaaatcatgtgtaatgaacccttatttccccaattggaagagctgggacttgaaaatctgccaaatctgaggcatttcattttgacaaagcaagctcttgaatttccattcctcagagaagtgctgattcgtaactgccctgaaacgaagatatttgtccaacagagatctgtcagtacatcaagtctcaaaagtgtgaacaatgatgatgagttgaaagttgttgatctcaacaaagcgatgtttaattctaaggtttcttgtcccaacctggaagtgctactactctataaggctaacagcataagtgctctatgctctcaccaacttccaactgcctacttcagcaaacttaaggaactaggagtatggaattgtggaaaattgagacacttgatgtctccatcagtggccagaggtcttctgaatctccgaaaactatggatacgagaatgccaatcaatggaagaagtgatcacagaagaggaacaacaaggagatgaaatcatgtgtaatgaacccttatttccccaattggaagagctgggacttgaaaatctgccaaatctgaggcatttcattttgacaaagcaagctcttgaatttccattcctcagagaagtgctgattcgtaactgccctgaaacgaagatatttgtccaacagagatctgtcagtacatcaagtctcaaaagtgtgaacaatgatgatgagttgaaagttgttgatctcaacaaagcgatgtttaattctaaggtttcttgtcccaacctggaaaagctatatatctattcggacataactgctctatactctcaccaacttccaactacctacttcagcaaacttgggacattgaaagtagaaaattgtggaaaattgagacacttgatatctccatcagtggccagaggtcttctgaatctccgaaaactacggataggagaatgccaatcaatggaagaagtgatcacagaagaggaacaacaaggagatgaaatcatgtgtaatgaacccttatttccccaattggaaaagctgaaacttgaaaatctgccaaagctgaggcatttcattttgacgaagcaagctcttgaatttccattcctcaaattagtggtgattcgtaaatgccctgaaatgaagatatttgtccaacatggatatgtgagtacaccaagtcttgaaattgtgaacgatgatgatgaggtaaaagtagatgatttgaacgaatggatacatcagaggttcaattctaaggaagaagatggaagtgaatctgaatcttctcagggagaagattggaatcgaatctga

SEQ ID NO: 221 - protein, 1745 aa, Capsicum annuum
MEIVTAILSPVAEHLMILPVARQIGYLFYYRRNIRSLENENKKLEGIRSGVQHRKDAEWRNLQVMPPHVENWLKDVNETTAEVAVLLRRRAEVERGCFYGWCPNLKSRHSLSRKAKKIEQAMIGLQDEGTRYAPSSCPAPLAVTVIHSDEFDSRKQKEEEVMTALKDEGITIVGICGMGGVGKTTLAEKVRARAKQERLFDYVVVLTISQQQPDIKKIQREIAEGVGLSLEGDDLLERGDRLRSRLMQKDSRVLVILDDVWKKVDLKRVGIPSGSDRNYWCKVILTTRLRDVCDDMEAKKKVHVEILCENEAWLLFRQKAGNSADDLSLPDIAEAVAKECKGLPLAIVTVAGALKGKTKRSWEDALLELKKAAPRNIRGVLADVYQPLKISYNHLGSDEAKDAFLLCSLFEEDSNIWTEELLRYGMGLGIFSELENLECARNRVSNLLETLKNCFLLSQVPGKDYVKMHDVVRDMAIHIASEGNHIFLVSHNVNSKEFPRKDSYKQYSHMSIVANKFDARPRPISCPRLKLLMLKLRFEEGFKLQDDFFDGMSELSVIKLSGYDRNSILPFPSSIQRLSNLSTLWLSNLRLDDVSIIGELVTLEILSIRGSDLQELPVEIGNLANLTMLEYWNTGYRNRMRISPGVLSRLVRLEELHMVGVEDCSYSTLRELESLSRLTALTLDGCSKDVIYSNLGLSSKLTRYALKMGRHYTFTSFMQTYNKAIYLDVTKGTPLGDWIRLLLRNSECVSSSGKGSKNVVFELQNVKDLRLSFCDSLNIHCQNNIPFPKLERLKVNGCDHLRHLFCVSLACPDEGTSRRTHIRPDVIKFPNLYYLELGFLKCFTHFFSDTVEGIEFPLLRKMHFWSLQKFQNFWPRVNNAITDSNPLFNEKVSCPNLELLRLCEANSLTALCSHQLPTAYFSKLVTLNVLRCGKLRNLMSPSVARGLLNLRILLLEDCESMEEVITEEEQQGDEIMCNEPLFPQLEELGLENLPNLRHFILTKQALEFPFLREVQIRNCPETKIFVQQRSVSTSSLKSVNNDDELKVVDLNKAMFNSKVSCPNLEVLRLYKANSISALCSHQLPTAYFSKLKELGVGNCGKLRHLMSPSVARGLLNLRKLWIGECQSMEEVITEEEQQGDEIMCNEPLFPQLEELGLENLPNLRHFILTKQALEFPFLREVLIRNCPETKIFVQQRSVSTSSLKSVNNDDELKVVDLNKAMFNSKVSCPNLEVLLLYKANSISALCSHQLPTAYFSKLKELGVWNCGKLRHLMSPSVARGLLNLRKLWIRECQSMEEVITEEEQQGDEIMCNEPLFPQLEELGLENLPNLRHFILTKQALEFPFLREVLIRNCPETKIFVQQRSVSTSSLKSVNNDDELKVVDLNKAMFNSKVSCPNLEVLLLYKANSISALCSHQLPTAYFSKLKELGVWNCGKLRHLMSPSVARGLLNLRKLWIRECQSMEEVITEEEQQGDEIMCNEPLFPQLEELGLENLPNLRHFILTKQALEFPFLREVLIRNCPETKIFVQQRSVSTSSLKSVNNDDELKVVDLNKAMFNSKVSCPNLEKLYIYSDITALYSHQLPTTYFSKLGTLKVENCGKLRHLISPSVARGLLNLRKLRIGECQSMEEVITEEEQQGDEIMCNEPLFPQLEKLKLENLPKLRHFILTKQALEFPFLKLVVIRKCPEMKIFVQHGYVSTPSLEIVNDDDEVKVDDLNEWIHQRFNSKEEDGSESESSQGEDWNRI

SEQ ID NO: 222 - DNA, 1557 bp, Artificial Sequence
  cDNA
gcacacacatcatcttggatgcttgaagtcttgaaagagaatttgaaggccattgcatatatgaagagtcagctcgtcaccaagcatgttgtgaagggtgagtgtatgatgttcaaacagtatttgcaggaaaaccccagggcaaatgaatttttccagcctaagatgtgggcgtatggaaagagtatgttgaataaggaagcctatatcaaggatataatgaaatattcaaaggttattgatgtaggagtagtcgattgcgaccggcatttgaggaagctatcgttagagttattgtatactcagatccacggctttcgcaaatgttcttacatcacagatgaagaggagatattcaaggcattgaatataaccacagctgttggagctatgtatggggggaagaaaaaggagtactttgaaaagttcacaacagaggataaggctgagattctccggcaaagctgtttgaggttgtacacgggtaaactgggtgtgtgggaatgggctctaaaagctgaactgagaagtaaggaaaagatagaagccaataagacacggactttcacagcagccccaattgatacactattaggtggtaaggtgtgtgtagatgatctcaacaaccagttttattcgaaaaatattgaatgttgttggacggttggaatgaccaaattctatggtggatgggataagcttttgacagctctgcctgctggatggatatattgcgatgcagatggttcgcaattcgatagttcattgacaccttatctcataaatgctgtattgactatacggtatgcttttatggaagattgggacattgggtataagatgttgcaaaacttgtacacagaaataatctacacaccaatatccacgcctgatggaacaattgtgaagaagttcagaggcaataacagtgggcaaccttccaccgttgtagacaactcacttatggttgtgcttgctatgcattatgcatttgtacgggaaggtatagcatttgaagaaattgactccatatgtaagttcttcgttaatggagacgatttgctaatagctgtgaacccagaacgtgagagcctattggacacactgtcgaatcatttttctgatttagggctcaattatgatttctcatctcggacgaggaataaatcagaattgtggttcatgtcacattgtgggatttctgttgaaggcacgtatataccgaagcttgaagaggagcgaattgtatcaattctccaatgggaccgagcagagctaccagaatacagattggaggctatttgtgcagcaatgattgaatcatggggctacccacaattaactcatgaaattcgaagattctatagctggttaattgagaagaacccatacgctgacttggcatctgaaggaaaagctccatacatttctgaactagctctaaagaagctgtatctgaatcaagatgtacaaatgatgagcttcaggtcttacctcaagtatttcgctgatgcagatgaagagtttgaatgcggtacatatgaagttcgtcatcag

SEQ ID NO: 223 - protein, 519 aa, Pepper mottle virus
AHTSSWMLEVLKENLKAIAYMKSQLVTKHVVKGECMMFKQYLQENPRANEFFQPKMWAYGKSMLNKEAYIKDIMKYSKVIDVGVVDCDRHLRKLSLELLYTQIHGFRKCSYITDEEEIFKALNITTAVGAMYGGKKKEYFEKFTTEDKAEILRQSCLRLYTGKLGVWEWALKAELRSKEKIEANKTRTFTAAPIDTLLGGKVCVDDLNNQFYSKNIECCWTVGMTKFYGGWDKLLTALPAGWIYCDADGSQFDSSLTPYLINAVLTIRYAFMEDWDIGYKMLQNLYTEIIYTPISTPDGTIVKKFRGNNSGQPSTVVDNSLMVVLAMHYAFVREGIAFEEIDSICKFFVNGDDLLIAVNPERESLLDTLSNHFSDLGLNYDFSSRTRNKSELWFMSHCGISVEGTYIPKLEEERIVSILQWDRAELPEYRLEAICAAMIESWGYPQLTHEIRRFYSWLIEKNPYADLASEGKAPYISELALKKLYLNQDVQMMSFRSYLKYFADADEEFECGTYEVRHQ

SEQ ID NO: 224 - DNA, 3915 bp, Artificial Sequence
  cDNA
atggaaagagtaaaagaaaatgaactagtgagaaaggaagaggaagcaaacaactcattggcgtcgttttctgctcttcgtgaggacgttgtcaatgttctggatttcatggagaggttaaagaacgaagaggatcgaaaagctgttgatgtggatcttattgaaaagctgaaattattgctgacatttatttgtacgtatgtccagctttcttattccgatttggatcagtttgaagatataatgactgacaaaagacaagaggttgagaatctgcttcagacaattttggatgatgtggacaacactgtcaggtgtaaatataacatgcatcatgtccttcctagccttgctgataatatggatgactgtatcagctcacatcatcgttctaaatcagatggcaccatgacggaggagcgattgaacttccttctcttgaatctccatcatctatccaagtatcatgctgaaaagatttttccgttagtgactgaatatgggattcttcagaacgtttgtgccaacataggagatttccatgggttgatagtgaatggttgcattaagcatgagattattgagaatgtcttacctctgtttcaactgatggtcgagagtgtaggacacttcctttgggaggatcaaactgatggagactctcaactctccgagctagatgaggatgatcagactgatggagactctgaactctctgaactatctgaggatgatcagactgatggagactctgaactctctgaggatgatcagattgatggagattttcgactcttcaagctagcacatctactcatgaagattattccaattgaactggaggtgatgcacatatgttatacaaatttgaaagcttcaccatcagtagaagttggacgctttattaagcaactccttgaaacctctccggatgttctgagagaatatctgattcatctacaagagcacatggtaactgttattaccgcaagcacttcaggggctcgaaacgttcatgtcattatagagttcctattgattatagttactgatgtgcccaaggactttattcatcatgacaaattgtttgatcttttggcacgtgttggagcacttgtcagggaggtatcaactcttgttcacgacttaatagagaaatcaaggaataaagagagaatcgaccaaacaatttgtgcaactcgagatttgctggaaaatattgaactcttcaaggaagatctcaaaaatgattatctgaaagccccggactcatatcaatgttgcttccccatgaatgatggaccgctgttcatgcatcttctactcatccacttaaatggtctgctagattccaattcttattcaattgctttgataaaggatgacattagaatggtgaaaaaagcctttgaattgataagatcgttcttcgtgaattttgagcaaggattgtataaagatctctgggcacatattttagatgtggcttatgaggctaaagatgtcattgattcaattattgttcgagataatggtctcttacatcttattttctcacttcccattacgataaaaaagatcaagcttatccaagaagaagtctccaatatatctgagaagattcccaagaacaggagcctcactgtagtaaactctactaagaagattgttgaaagcaagtcactgacagttggtaaaataattgtaggttttgaggaggagacaaattggttaattagtaagctcaccagtggactaaaagatctagatgtcatctcaatcactggtatgccgggttcgggcaaaactactttggcatacaaagtatacaatgatgagtccgtttctagacgtttcgacatttgtgcatggtgcacagttggccaagaatacgacaaaataaatttgttggagaaagtttataatcaagttaccggccctgattcaaaattgagtgagaatattgatgttgctgatgagctaaggagacatctgcttggaaagaggtatcttattgtcttagatgacttgtgggatactgatgcatgggataagttaacaagaccttttcctctagttgagaatggaagcagaataattttgacatctcgagatatggtagtgggtttgtatggaaagcgcaacactgatcctcttaaccttcgtttgctaaggccagaagaaagttgggagttattagagaaaagggcatttggaaacaagagctgccctgatgaactattggatgttggaaaagaaatcgcccaaaattgtaagggacttcctttggttgttgatctgattgctggagtcattgcaggtagggaaaagacaaagtctgtatggcttgaaattcgaaataatttgaattcctttattttgaatagtgaagtttatgtgatgaaggttgtgaaattaagttatgaccatttacctcttcaactaaagccatgctttctctaccttgcgaggtatccgaaggacaatgcagtggatagaaattggttgaaaatgttttggtgtgctgaagggcttgttgaacagacagagctgaagagtttggaagaagtgatggaaatttatttggataatttaatttccagtagcttggtaattgctttcaatgagataggtaattacccgacttgccaactacatgatcttgtgcatgacttttgtttgataaaagcaaaagaggaaaagttgtttgagaaggtaagttcaagtgatctatcttcttcttcagatttgatgtcgcatatagtgaccatttattatgataaggagcactttgaatataacaatttcgtcctgctcgattcaaaaatgaaaaggcggtatggtaaacacctctattctttggtgataactggagacgagatggaagatcgtttttctgatgcatgtcacctaagagacttgaggcttcttagagtgttgtacctgaagccatcttttatgatggtgaaagagtctttgctgaatgaaataggcatgttgaatcatttgaggttcttaagcattggggcagaagttaaagctctgcctttatctttctcaaacctttggaatctagaaaccctatgggttaaaaacaaaggatcaaccttggtactattacctagtctttgggatcttgtaaagttgcgagtgctgtccattgatgattgttctttctttgacttggatactgttgaatcaatactgataactgtggactcacagttagagaacttgagagaattagggaaactcgtgctttcctattcaaaagaaacagaggttattttcaaaaggttccccaatcttcaagagctttcatttgttctcaaggaatcatgggattactcaacagagcgatattggttcccgaaatttgatttcctaactgaactagaacacctcacagtagattttaaaagttcaaattccaatgacagtggggcctctgtagcgacaaatcggtcttgggattttcacttcccttccaatttgagaacattgttgttgtatgactttcctctggcatccgattcactatcaacaatagcgaaactgcccaatcttgaagagttgttccttaggagaacaatcatccatggggaggaatggaacatgagggaggaagacacctttgagaatctcaaatatttgaacttgactgaagtgactcttgctaagtgggaagttggagaggaatcctttcctgtgattgagaaattagtactgcggaaatgtcatatgcttaaggagattccacctagtttcggtgatatttgttcgttgaaaatcatcaaacttgtagagagccctcatgttgaagattctgctaagaagattaaacaatatgttgaagatatgggaggggacgagcttcaggtcctgggctgggaggatatccccttatttaagtag

SEQ ID NO: 225 - protein, 1304 aa, Capsicum annuum
MERVKENELVRKEEEANNSLASFSALREDVVNVLDFMERLKNEEDRKAVDVDLIEKLKLLLTFICTYVQLSYSDLDQFEDIMTDKRQEVENLLQTILDDVDNTVRCKYNMHHVLPSLADNMDDCISSHHRSKSDGTMTEERLNFLLLNLHHLSKYHAEKIFPLVTEYGILQNVCANIGDFHGLIVNGCIKHEIIENVLPLFQLMVESVGHFLWEDQTDGDSQLSELDEDDQTDGDSELSELSEDDQTDGDSELSEDDQIDGDFRLFKLAHLLMKIIPIELEVMHICYTNLKASPSVEVGRFIKQLLETSPDVLREYLIHLQEHMVTVITASTSGARNVHVIIEFLLIIVTDVPKDFIHHDKLFDLLARVGALVREVSTLVHDLIEKSRNKERIDQTICATRDLLENIELFKEDLKNDYLKAPDSYQCCFPMNDGPLFMHLLLIHLNGLLDSNSYSIALIKDDIRMVKKAFELIRSFFVNFEQGLYKDLWAHILDVAYEAKDVIDSIIVRDNGLLHLIFSLPITIKKIKLIQEEVSNISEKIPKNRSLTVVNSTKKIVESKSLTVGKIIVGFEEETNWLISKLTSGLKDLDVISITGMPGSGKTTLAYKVYNDESVSRRFDICAWCTVGQEYDKINLLEKVYNQVTGPDSKLSENIDVADELRRHLLGKRYLIVLDDLWDTDAWDKLTRPFPLVENGSRIILTSRDMVVGLYGKRNTDPLNLRLLRPEESWELLEKRAFGNKSCPDELLDVGKEIAQNCKGLPLVVDLIAGVIAGREKTKSVWLEIRNNLNSFILNSEVYVMKVVKLSYDHLPLQLKPCFLYLARYPKDNAVDRNWLKMFWCAEGLVEQTELKSLEEVMEIYLDNLISSSLVIAFNEIGNYPTCQLHDLVHDFCLIKAKEEKLFEKVSSSDLSSSSDLMSHIVTIYYDKEHFEYNNFVLLDSKMKRRYGKHLYSLVITGDEMEDRFSDACHLRDLRLLRVLYLKPSFMMVKESLLNEIGMLNHLRFLSIGAEVKALPLSFSNLWNLETLWVKNKGSTLVLLPSLWDLVKLRVLSIDDCSFFDLDTVESILITVDSQLENLRELGKLVLSYSKETEVIFKRFPNLQELSFVLKESWDYSTERYWFPKFDFLTELEHLTVDFKSSNSNDSGASVATNRSWDFHFPSNLRTLLLYDFPLASDSLSTIAKLPNLEELFLRRTIIHGEEWNMREEDTFENLKYLNLTEVTLAKWEVGEESFPVIEKLVLRKCHMLKEIPPSFGDICSLKIIKLVESPHVEDSAKKIKQYVEDMGGDELQVLGWEDIPLFK

SEQ ID NO: 226 - DNA, 4041 bp, Capsicum annuum
atggaaagagtaaaagaaaatgaactagtgagaaaggaagaggaagcaaacaactcattggtatgtcatgatcaatatatagcttatgtacagcattctattttgaagaaatccctcttctgtagctatgttaagttctgtggctttgaaaatttgataggaatgtaacatttggtctttttgcaggcgtcgttttctgctcttcgtgaggacgttgtcaatgttctggatttcatggagaggttaaagaacgaagaggatcgaaaagctgttgatgtggatcttattgaaaagctgaaattattgctgacatttatttgtacgtatgtccagctttcttattccgatttggatcagtttgaagatataatgactgacaaaagacaagaggttgagaatctgcttcagacaattttggatgatgtggacaacactgtcaggtgtaaatataacatgcatcatgtccttcctagccttgctgataatatggatgactgtatcagctcacatcatcgttctaaatcagatggcaccatgacggaggagcgattgaacttccttctcttgaatctccatcatctatccaagtatcatgctgaaaagatttttccgttagtgactgaatatgggattcttcagaacgtttgtgccaacataggagatttccatgggttgatagtgaatggttgcattaagcatgagattattgagaatgtcttacctctgtttcaactgatggtcgagagtgtaggacacttcctttgggaggatcaaactgatggagactctcaactctccgagctagatgaggatgatcagactgatggagactctgaactctctgaactatctgaggatgatcagactgatggagactctgaactctctgaggatgatcagattgatggagattttcgactcttcaagctagcacatctactcatgaagattattccaattgaactggaggtgatgcacatatgttatacaaatttgaaagcttcaccatcagtagaagttggacgctttattaagcaactccttgaaacctctccggatgttctgagagaatatctgattcatctacaagagcacatggtaactgttattaccgcaagcacttcaggggctcgaaacgttcatgtcattatagagttcctattgattatagttactgatgtgcccaaggactttattcatcatgacaaattgtttgatcttttggcacgtgttggagcacttgtcagggaggtatcaactcttgttcacgacttaatagagaaatcaaggaataaagagagaatcgaccaaacaatttgtgcaactcgagatttgctggaaaatattgaactcttcaaggaagatctcaaaaatgattatctgaaagccccggactcatatcaatgttgcttccccatgaatgatggaccgctgttcatgcatcttctactcatccacttaaatggtctgctagattccaattcttattcaattgctttgataaaggatgacattagaatggtgaaaaaagcctttgaattgataagatcgttcttcgtgaattttgagcaaggattgtataaagatctctgggcacatattttagatgtggcttatgaggctaaagatgtcattgattcaattattgttcgagataatggtctcttacatcttattttctcacttcccattacgataaaaaagatcaagcttatccaagaagaagtctccaatatatctgagaagattcccaagaacaggagcctcactgtagtaaactctactaagaagattgttgaaagcaagtcactgacagttggtaaaataattgtaggttttgaggaggagacaaattggttaattagtaagctcaccagtggactaaaagatctagatgtcatctcaatcactggtatgccgggttcgggcaaaactactttggcatacaaagtatacaatgatgagtccgtttctagacgtttcgacatttgtgcatggtgcacagttggccaagaatacgacaaaataaatttgttggagaaagtttataatcaagttaccggccctgattcaaaattgagtgagaatattgatgttgctgatgagctaaggagacatctgcttggaaagaggtatcttattgtcttagatgacttgtgggatactgatgcatgggataagttaacaagaccttttcctctagttgagaatggaagcagaataattttgacatctcgagatatggtagtgggtttgtatggaaagcgcaacactgatcctcttaaccttcgtttgctaaggccagaagaaagttgggagttattagagaaaagggcatttggaaacaagagctgccctgatgaactattggatgttggaaaagaaatcgcccaaaattgtaagggacttcctttggttgttgatctgattgctggagtcattgcaggtagggaaaagacaaagtctgtatggcttgaaattcgaaataatttgaattcctttattttgaatagtgaagtttatgtgatgaaggttgtgaaattaagttatgaccatttacctcttcaactaaagccatgctttctctaccttgcgaggtatccgaaggacaatgcagtggatagaaattggttgaaaatgttttggtgtgctgaagggcttgttgaacagacagagctgaagagtttggaagaagtgatggaaatttatttggataatttaatttccagtagcttggtaattgctttcaatgagataggtaattacccgacttgccaactacatgatcttgtgcatgacttttgtttgataaaagcaaaagaggaaaagttgtttgagaaggtaagttcaagtgatctatcttcttcttcagatttgatgtcgcatatagtgaccatttattatgataaggagcactttgaatataacaatttcgtcctgctcgattcaaaaatgaaaaggcggtatggtaaacacctctattctttggtgataactggagacgagatggaagatcgtttttctgatgcatgtcacctaagagacttgaggcttcttagagtgttgtacctgaagccatcttttatgatggtgaaagagtctttgctgaatgaaataggcatgttgaatcatttgaggttcttaagcattggggcagaagttaaagctctgcctttatctttctcaaacctttggaatctagaaaccctatgggttaaaaacaaaggatcaaccttggtactattacctagtctttgggatcttgtaaagttgcgagtgctgtccattgatgattgttctttctttgacttggatactgttgaatcaatactgataactgtggactcacagttagagaacttgagagaattagggaaactcgtgctttcctattcaaaagaaacagaggttattttcaaaaggttccccaatcttcaagagctttcatttgttctcaaggaatcatgggattactcaacagagcgatattggttcccgaaatttgatttcctaactgaactagaacacctcacagtagattttaaaagttcaaattccaatgacagtggggcctctgtagcgacaaatcggtcttgggattttcacttcccttccaatttgagaacattgttgttgtatgactttcctctggcatccgattcactatcaacaatagcgaaactgcccaatcttgaagagttgttccttaggagaacaatcatccatggggaggaatggaacatgagggaggaagacacctttgagaatctcaaatatttgaacttgactgaagtgactcttgctaagtgggaagttggagaggaatcctttcctgtgattgagaaattagtactgcggaaatgtcatatgcttaaggagattccacctagtttcggtgatatttgttcgttgaaaatcatcaaacttgtagagagccctcatgttgaagattctgctaagaagattaaacaatatgttgaagatatgggaggggacgagcttcaggtcctgggctgggaggatatccccttatttaagtag

SEQ ID NO: 227 - DNA, 2586 bp, Artificial Sequence
  cDNA
atggctgaaattcttcttacatcagtaatcaataaatctgtagaaatagctggaaatttactgattcaagaaggaaagcgtttatattggttgaaagaggatatcgattggctccagagagaaatgagacacattcgatcttatgttgacaacgcaaaggccaaggaagctggaggtgattcaagggtcaaaaacttattgaaagatattcaagaattggcaggtgatgtggaggatctcttagatgacttccttccaaaaattcaacaatccaataagttcaattattgccttaagaggagttcttttgcggatgagtttgctatggagattgagaagataaagagaagggttgttgacattgaccgaataaggaaaacttacaacatcatagatacagataacaataatgatgattgtgttctgctggatcggagaagattattcctacatgctgatgaaacagagatcatcggtttggatgatgacttcaatatgctacaagccaaattacttaatcaagatttgcattatggagttgtttccatagttggcatgcccggtctggggaaaacaactcttgccaagaaactttataggctcattcgtgatcaatttgagtgttctggactggtctacgtttcacaacagccaagagcgagtgaaatcttacttgacattgccaaacaaattggactgacggaacagaaaatgaaggaaaatttggaggacaacctgcgatcactcttgaaaataaaaaggtatgttttcctcctagatgacatttgggatgtggaaatttgggatgatctgaaacttgtccttcctgaatgtgattcaaaagtcggcagtagaattataatcacgtctcgaaatagtaatgtaggcagatacataggaggggaatcctccctccatgcattgcaacccctagaatccgagaaaagctttgaactctttaccaagaaaatctttaattttgatgataataatagttgggccaatgcttcacctgacttggtgaatattggtagaaatatagttgggagatgtggaggtataccgctagccatagtggtgactgcaggcatgttaagggcaagagaaagaacagaacatgcgtggaacagagtacttgagagtatgggccataaagttcaagatggatgtgctaaggtattggctctcagttacaatgatttacctattgcctcaaggccatgtttcttgtactttggcctttaccccgaggaccatgaaattcgtgcttttgatttgataaatatgtggattgctgagaagtttatagtagtaaatagtggtaataggcgagaggctgaggatttggcggaggacgtcctaaatgatttggtttctagaaacttgattcaacttgccaaaaggacatataatggaagaatttcaagttgtcgcatacatgacttgttacatagtttgtgtgtggacttggctaaggaaagtaacttctttcacaccgcgcatgatgcatttggtgatcccggcaatgttgctaggctccgaaggattacattctactctgacaatgtcatgattgagttcttccgttcaaatcctaagcttgagaagcttcgtgtacttttctgtttcgcaaaagacccttccatattttctcatatggcttattttgacttcaaattgttgcacacattggttgtagtcatgtctcaaagttttcaagcatatgtcactatcccaagcaaatttgggaacatgacttgcttacgctatctgagattggaggggaatatttgtggaaaactgccaaatagtattgtcaagctcacacgtctagagaccatagacattgatcgacgtagcctcattcaacctccttctggtgtttgggagtctaaacatttgagacatctttgttatagagattatggacaagcatgtaacagttgcttttctataagctcattttacccaaatatttactcattgcatcctaacaatctacaaaccttgatgtggatacctgataaattttttgaaccgaggttgttgcaccgattgatcaatttaagaaaactgggtatactgggagtgtccaattctaccgttaagatgttatcaatatttagccctgtgctcaaggcgctggaggttctgaagctcagtttttccagtgacccgagtgaacaaataaagttgtcatcgtatccacatattgctaagttgcatttgaatgttaacagaacaatggccttgaactctcaatcatttcctccaaatctcatcaagcttactctagccaactttacggtagaccgttatatactggcagtacttaagacatttcccaaattaagaaaacttaaaatgttcatctgcaagtataatgaagaaaagatggatctctcgggcgaggcaaatggttatagctttccgcaacttgaagttttgcatattcatagcccgaatgggttgtctgaagtaacgtgcacggatgatgtcagtatgcccaaattgaaaaagctgttacttacaggattccattgccgaatcagtttatcggaacggcttaaaaagctgagtaaatga

SEQ ID NO: 228 - protein, 861 aa, Solanum lycopersicum
MAEILLTSVINKSVEIAGNLLIQEGKRLYWLKEDIDWLQREMRHIRSYVDNAKAKEAGGDSRVKNLLKDIQELAGDVEDLLDDFLPKIQQSNKFNYCLKRSSFADEFAMEIEKIKRRVVDIDRIRKTYNIIDTDNNNDDCVLLDRRRLFLHADETEIIGLDDDFNMLQAKLLNQDLHYGVVSIVGMPGLGKTTLAKKLYRLIRDQFECSGLVYVSQQPRASEILLDIAKQIGLTEQKMKENLEDNLRSLLKIKRYVFLLDDIWDVEIWDDLKLVLPECDSKVGSRIIITSRNSNVGRYIGGESSLHALQPLESEKSFELFTKKIFNFDDNNSWANASPDLVNIGRNIVGRCGGIPLAIVVTAGMLRARERTEHAWNRVLESMGHKVQDGCAKVLALSYNDLPIASRPCFLYFGLYPEDHEIRAFDLINMWIAEKFIVVNSGNRREAEDLAEDVLNDLVSRNLIQLAKRTYNGRISSCRIHDLLHSLCVDLAKESNFFHTAHDAFGDPGNVARLRRITFYSDNVMIEFFRSNPKLEKLRVLFCFAKDPSIFSHMAYFDFKLLHTLVVVMSQSFQAYVTIPSKFGNMTCLRYLRLEGNICGKLPNSIVKLTRLETIDIDRRSLIQPPSGVWESKHLRHLCYRDYGQACNSCFSISSFYPNIYSLHPNNLQTLMWIPDKFFEPRLLHRLINLRKLGILGVSNSTVKMLSIFSPVLKALEVLKLSFSSDPSEQIKLSSYPHIAKLHLNVNRTMALNSQSFPPNLIKLTLANFTVDRYILAVLKTFPKLRKLKMFICKYNEEKMDLSGEANGYSFPQLEVLHIHSPNGLSEVTCTDDVSMPKLKKLLLTGFHCRISLSERLKKLSK

SEQ ID NO: 229 - DNA, 795 bp, Artificial Sequence
  cDNA
atggctctagttgttaaaggtaaggtaaatattaatgagtttatcgatctgtcaaagtctgagaaacttctcccgtcgatgttcacgcctgtaaagagtgttatggtttcaaaggttgataagattatggtccatgaaaatgaatcattgtctgaagtaaatctcttaaaaggtgtaaaacttatagaaggtgggtatgtttgcttagtgggtcttgttgtgtccggtgagtggaatttaccagataattgccgtggtggtgtgagtgtctgcatggttgacaagagaatggaaagagcggacgaagccacactggggtcatattacactgctgctgctaaaaagcggtttcagtttaaagtggtcccaaattacggtattacaacaaaggatgcagaaaagaacatatggcaggtcttagtaaatattaaaaatgtaaaaatgagtgcgggctactgccctttgtcattagaatttgtgtctgtgtgtattgtttataaaaataatataaaattgggtttgagggagaaagtaacgagtgtgaacgatggaggacccatggaactttcagaagaagttgttgatgagttcatggagaatgttccaatgtcggttagactcgcaaagtttcgaaccaaatcctcaaaaagaggtccgaaaaataataataatttgggtaaggggcgttcaggcggaaggcctaaaccaaaaagttttgatgaagttgaaaaagagtttgataatttgattgaagatgaagccgagacgtcggtcgcggattctgattcgtattaa

SEQ ID NO: 230 - protein, 264 aa, Tomato mosaic virus
MALVVKGKVNINEFIDLSKSEKLLPSMFTPVKSVMVSKVDKIMVHENESLSEVNLLKGVKLIEGGYVCLVGLVVSGEWNLPDNCRGGVSVCMVDKRMERADEATLGSYYTAAAKKRFQFKVVPNYGITTKDAEKNIWQVLVNIKNVKMSAGYCPLSLEFVSVCIVYKNNIKLGLREKVTSVNDGGPMELSEEVVDEFMENVPMSVRLAKFRTKSSKRGPKNNNNLGKGRSGGRPKPKSFDEVEKEFDNLIEDEAETSVADSDSY

SEQ ID NO: 231 - DNA, 2586 bp, Artificial Sequence
  cDNA
atggctgaaattcttcttacatcagtaatcaataaatctgtagaaatagctggaaatttactgattcaagaaggaaagcgtttatattggttgaaagaggatatcgattggctccagagagaaatgagacacattcgatcttatgttgacaacgcaaaggccaaggaagctggaggtgattcaagggtcaaaaacttattgaaagatattcaagaattggcaggtgatgtggaggatctcttagatgacttccttccaaaaattcaacaatccaataagttcaattattgccttaagaggagttcttttgcagatgagtttgctatggagattgagaagataaagagaagggttgttgacattgaccgaataaggaaaacttacaacatcatagatacagataacaataatgatgattgtgttctgctggatcggagaagattattcctacatgctgatgaaacagagatcatcggtttggatgatgacttcaatatgctacaagccaaattacttaatcaagatttgcattatggagttgtttccatagttggcatgcccggtctggggaaaacaactcttgccaagaaactttataggctcattcgtgatcaatttgagtgttctggactggtctacgtttcacaacagccaagagcgagtgaaatcttacttgacattgccaaacaaattggactgacggaacagaaaatgaaggaaaatttggaggacaacctgcgatcactcttgaaaataaaaaggtatgttatcctcctagatgacatttgggatgtggaaatttgggatgatctgaaacttgtccttcctgaatgtgattcaaaagtcggcagtagaatgataatcacgtctcgaaatagtaatgtaggcagatacataggaggggaatcctccctccatgcattgcaacccctagaatccgagaaaagctttgaactctttaccaagaaaatctttaattttgatgataataatagttgggccaatgcttcacctgacttggtgaatattggtagaaatatagttgggagatgtggaggtataccgctagccatagtggtgactgcaggcatgttaagggcaagagaaagaacagaacatgcgtggaacagagtacttgagagtatgggccataaagttcaagatggatgtgctaaggtattggctctcagttacaatgatttacctattgcctcaaggccatgtttcttgtactttggcctttaccccgaggaccatgaaattcgtgcttttgatttgataaatatgtggattgctgagaagtttatagtagtaaatagtggtaataggcgagaggctgaggatttggcggaggacgtcctaaatgatttggtttctagaaacttgattcaacttgccaaaaggacatataatggaagaatttcaagttgtcgcatacatgacttgttacatagtttgtgtgtggacttggctaaggaaagtaacttctttcacaccgcgcatgatgcatttggtgatcccggcaatgttgctaggctccgaaggattacattctactctgacaatgtcatgattgagttcttccgttcaaatcctaagcttgagaagcttcgtgtacttttctgtttcgcaaaagacccttccatattttctcatatggcttattttgacttcaaattgttgcacacattggttgtagtcatgtctcaaagttttcaagcatatgtcactatcccaagcaaatttgggaacatgacttgcttacgctatctgagattggaggggaatatttgtggaaaactgccaaatagtattgtcaagctcacacgtctagagaccatagacattgatcgacgtagcctcattcaacctccttctggtgtttgggagtctaaacatttgagacatctttgttatagagattatggacaagcatgtaacagttgcttttctataagctcattttacccaaatatttactcattgcatcctaacaatctacaaaccttgatgtggatacctgataaattttttgaaccgaggttgttgcaccgattgatcaatttaagaaaactgggtatactgggagtgtccaattctaccgttaagatgttatcaatatttagccctgtgcttaaggcgctggaggttctgaagctcagtttttccagtgacccgagtgaacaaataaagttgtcatcgtatccacatattgctaagttgcatttgaatgttaacagaacaatggccttgaactctcaatcatttcctccaaatctcatcaagcttactctagcctactttagtgtagaccgttatatactggcagtacttaagacatttcccaaattaagaaaacttaaaatgttcatctgcaagtataatgaagaaaagatggatctctcgggcgaggcaaatggttatagctttccgcaacttgaagttttgcatattcatagcccgaatgggttgtctgaagtaacgtgcacggatgatgtcagtatgcccaaattgaaaaagctgttacttacaggattccattgccgaatcagtttatcggaacggcttaaaaagctgagtaaatga

SEQ ID NO: 232 - protein, 861 aa, Solanum lycopersicum
MAEILLTSVINKSVEIAGNLLIQEGKRLYWLKEDIDWLQREMRHIRSYVDNAKAKEAGGDSRVKNLLKDIQELAGDVEDLLDDFLPKIQQSNKFNYCLKRSSFADEFAMEIEKIKRRVVDIDRIRKTYNIIDTDNNNDDCVLLDRRRLFLHADETEIIGLDDDFNMLQAKLLNQDLHYGVVSIVGMPGLGKTTLAKKLYRLIRDQFECSGLVYVSQQPRASEILLDIAKQIGLTEQKMKENLEDNLRSLLKIKRYVILLDDIWDVEIWDDLKLVLPECDSKVGSRMIITSRNSNVGRYIGGESSLHALQPLESEKSFELFTKKIFNFDDNNSWANASPDLVNIGRNIVGRCGGIPLAIVVTAGMLRARERTEHAWNRVLESMGHKVQDGCAKVLALSYNDLPIASRPCFLYFGLYPEDHEIRAFDLINMWIAEKFIVVNSGNRREAEDLAEDVLNDLVSRNLIQLAKRTYNGRISSCRIHDLLHSLCVDLAKESNFFHTAHDAFGDPGNVARLRRITFYSDNVMIEFFRSNPKLEKLRVLFCFAKDPSIFSHMAYFDFKLLHTLVVVMSQSFQAYVTIPSKFGNMTCLRYLRLEGNICGKLPNSIVKLTRLETIDIDRRSLIQPPSGVWESKHLRHLCYRDYGQACNSCFSISSFYPNIYSLHPNNLQTLMWIPDKFFEPRLLHRLINLRKLGILGVSNSTVKMLSIFSPVLKALEVLKLSFSSDPSEQIKLSSYPHIAKLHLNVNRTMALNSQSFPPNLIKLTLAYFSVDRYILAVLKTFPKLRKLKMFICKYNEEKMDLSGEANGYSFPQLEVLHIHSPNGLSEVTCTDDVSMPKLKKLLLTGFHCRISLSERLKKLSK

SEQ ID NO: 233 - DNA, 6351 bp, Artificial Sequence
  cDNA
atggaaatggtaactaatattttgagcccagtcgcagaacacttgatcataccgccagttgtgcgacagattgggtatttgttttactataggcgcaacatcaggtctctggatgaagaatctaataagctcgagaatatcagaagtggggtgaatcaaagagtggaggctgcccggagaaacttacaagtcatttcacccaatgttgaggcttggttaactagtgttgatactactactgctgatgtggcagttgtaatgggaggtcgaactgaggttgaaaggggttgcatctacggttggtgtccaacattgaagtcacgttacttgctgagcaggagagccaagaaaattacactggaagttactaaacttcaaaaggaaggtaacgagtatgctgttttctgctatccggttccagctgatgaaattgaagctatacctagtaacactaatgaggagtttgtctctagaaaacagaaggaggaagaggtcatgacagctttgaaagatgaggagatcactattgttgggatatgtggtatgggtggtgttggtaaaacatcactggctgagaaagtaagagcaagggcaaaacaagaaaggttatttaatgatgttgtcatggtaactgtcagtcaacaacaagacctgaaaagaattcagggcgagatcgccggagaggtcgggctgacgtcattgcaaggagacaatttgttaagtcgtggagatcagctgcgtgcaaggttaatgcaagaaggaagtcgcgtccttgtaattttggatgatgtttgggaggctcttgatgatctagagaaacttggaattcccactggcagcaaccacaactatcagtgcaaagtggcattgacgacgcgccgccaagatgtttgtgacgctatgaaggctcaaaagactgtagatgttgtaatcttatctgatgaagaagcatgggtcctttttaggcagaaagccggttattcagctgatgatccctctctttctgaagtagcaaaagaagttgccaaagaatgcaaggggctgccacttgcaattgttattgttgcaggagcactaaagactaaaaccaagccttcatgggatgatgcccttgtagaattaagaaaagcatcaccaaaaaatatcccaagagtgcttacaaaggtgtatcaacctctgaagacaagctatgatcacttagagagtgatgaagccaggtatgtctttttgctttgttccttgtttgaggaagatagtgatatttggaccgaagaattacttaaatatggagtgggacttggcatcttttcggaactcgaaaatttagaatgtgcaagaaatagggtgtgtaatctgttagaaacattgaaaaattgtttcttgttatcccaaggtaaagacaaaaattatgtcaaaatgcatgatgtggtccgtgacgtggctatatatattgcgtctgagggtgagcataaatttctggtaaatcacaatgtgaactcaaacgtgttcttgagaaaagtctcttatgagcaatacagtcacatgtcaattgttgcaaataaatttgatgagcgtcccacaccaatattttgcccacgattgaagcttctgatgttaaaactccgtttcgaagagggtttcaaattacaggatgatttttttgatggaatgagtgaactcagtgtcataaaactgagtggatatgatcgaaactccattctgccctttccatcatccattcagaggttgtcaaatctgagcacgctttggctgagtaatctaaggttggatgacgtgtccattattgggaaacttgtcactttagaaattctcagcatcagaggttctgacttacaggagcttccagtggagatcggaaacttggccaatctaactatgttagagtattggaatactggttacagaaaacgtatgaggatttcaccaggggtcttatcaagactagttcgattggaggaactacatatggtgggagtagaagattgtagttactccaccttgagggagctggaatcgttatcgagattgactgcactggcatttgatgaatgttccgtagatgtgatttacagtaacttgggcctttcctccaagttgacacggtacgctcttaaaatgggtagacactacacgtttacttcattcatggaaacttacaacaaggctatcgatctagacgtcaccaagggcaccccattgggtgattggatctgcctcctgttgaggaatagcgaagttgtacattcaagaggaaagggctccaagaatgtaatggtcgagttgcagaatgtgaaagatctcatgctgtctgattgtgattcattgaatatccactatcagaataatatttcattccccgaactcgaaaggctggaggtacgctattgtgattatctacggcatcttttttgtgtgtccttggcttgccctgatgaggggacctctcgaaggacacacatcagacctgacgtaatcaagttccccaatttacatagcttgacacttcgtaatctggaattcttcacacacttttacagtgacactgttgagggcattgagttccctctgttacgggtaatatatctcaggggattaccagagttccaaaatttctggccaacagccaacaatgctatcaccgactcaaatcctctttttaatgaaaaggtttcttgtcccaacctgaaagtgctaaaactccatgaggctaacagcataactgctctgtgctctcaccaacttccaactacctacttcagcaaacttgagacattgaaagtagaaaattgtggaaaattgagacacttgatgtctccatcagtggccagaggtcttctgaatctccgaatattactattagaatactgcgaatcaatggaagaagtgatcatagaagaagaacaagaaggagatgaaatcatgtgtaacgaacccttatttccccaattggaagagctggaacttcaaaatctgccaaagctgaggcatttcattttgacgaagcaagctcttgaatttccattcctcatagaagtgaagattcgtaactgccctgaaatgaagatgcttgtccaacggagatttgtcagtacatcaagtctcaaaagtgtgaacaatgatgatgagttgaaagttgttgatctcaacaaagcgatgtttaattctaaggtttcttgtcccaacctgaaagtgctaaaactccatgaggctaacaacataactgctctgtgctctcaccaacttccaactacctacttcagcaaacttgagacattggaagtagaaaattgtggaaaattgagacacttgatgtctccatcagtggccagaggtcttctgaatctccgaatattactattaggatactgtgaatcaatggaagaagtgatcatagaagaagaacaagaaggagaagaaaacatgactaatgagcccttatttcccctgttggaagagctgatactcgataagctaccaaagctggggcatttctttctgacgaagcgtgctcttgaatttccattcctcagagaagtgaagattcgtaaatgccctgaaatgaagatgcttgtccaacagagatctgtcagtacatcaagtctcaaaagtgtgaacaatgatgatgagttgaaagttgttgatctcaacaaagcgatgtttaattctaaggtttcttgtcccaacctgaaagtgctaaaactccatgaggctaacagcataactgctctgtgctctcaccaacttccaactacctacttcagcaaacttgagacattggaagtagaaaattgtggaaaattgagacacttgatgtctccatcagtggccagaggtcttctgaatctccgaatattactattaggatactgtgaatcaatggaagaagtgatcatagaagaagaacaagaaggagaagaaaacatgactaatgagcccttatttcccctgttggaagagctgatactcgataagctaccaaagctggggcatttctttctgacgaagcgtgctcttgaatttccattcctcagagaagtgaagattcgtaaatgccctgaaatgaagatgcttgtccaacagagatctgtcagtacatcaagtctcaaaagtgtgaacaatgatgatgagttgaaagttgttgatctcaacaaagcgatgtttaattctaaggtttcttgtcccaacctgaaagtgctaaaactccatgaggctaacaacataactgctctgtgctctcaccaacttccaactacctacttcagcaaacttgagacattggaagtagaaaattgtggaaaattgagacacttgatgtctccatcagtggccagaggtcttctgaatctccgaatattactattaggatactgtgaatcaatggaagaagtgatcatagaagaagaacaagaaggagaagaaaacatgactaatgagcccttatttcccctgttggaagagctgatactcgataagctaccaaagctggggcatttctttctgacgaagcgtgctcttgaatttccattcctcagagaagtgaagattcgtaaatgccctgaaatgaagatgcttgtccaacagagatctgtcagtacatcaagtctcaaaagtgtgaacaatgatgatgagttgaaagttgttgatctcaacaaagcgatgtttaattctaaggtttcttgtcccaacctgaaagtgctaaaactccatgaggctaacaacataactgctctgtgctctcaccaacttccaactacctacttcagcaaacttgagacattggaagtagaaaattgtggaaaattgagacacttgatgtctccatcagtggccagaggtcttctgaatctccgaatattactattaggatactgtgaatcaatggaagaagtgatcatagaagaagaacaagaaggagaagaaaacatgactaatgagcccttatttcccctgttggaagagctgatactcgataagctaccaaagctggggcatttctttctgacgaagcgtgctcttgaatttccattcctcagagaagtgaagattcgtaaatgccctgaaatgaagatgcttgtccaacagagatctgtcagtacatcaagtctcaaaagtgtgaacaatgatgatgagttgaaagttgttgatctcaacaaagcgatgtttaattctaaggtttcttgtcccaacctggaattgctacgactctataaggctaacagcgtaggttctctattctctcaccaacttccaactacctacttcagcaaacttgagacattggaagtagaaaattgtggaaaattgagacacttgatgtctccatcagtggccagaggtcttctgaatctccgaatattaatattaagagactgtgaatcaatggaagaagtgatcacagaagaggaacaagaaggagatgaaatcatgtgtaatgaaccattatttccccaattggaagagctgaaacttgaaaatctgccaaagctgaggcatttcattttgacaaagcaagctcttgaaattcccttcctcatagaagtgcagattcgtaactgccctgaaatgaagatgcttgtccaacagagatctgtcagtacatcaagtctcaaaagtgtgaacaatgatgatgagttgaaagttgttgatctcaacaaagcgatgtttaattctaaggtttcttgtcccaacctggaattgctacgactctataaggctaacagcgtaggttctctattctctcaccaacttccaactacctacttcagcaaacttatgcaactaggaatacggaattgtggaaaattgagacacttgatgtctccatcagtggccagaggtcttctgaatctccgaatattaatattaggagactgtgaatcaatggaagaagtgatcacagaagaggaacaagaaggagaagaaaacatgactaatgagtccttatttccctgcttggaaatgctgaaacttgaaaatctgccaaagctggggcatttctttctgacgaagcgtgctcttgaatttccattcctcagagaagtgaagattcgtacatgccctgaaatgaagatatttgtccaacatggatctgtgagtacaccaagtctcgaaattgtgaacaatgatgatgaggtaaaagtagatgatctgaacgaatggatacatcagaggttcaattctaaggaagaagatggaagtgaatctgaatcttctcaggaagaagatggaagcgaatctgaagcttctcatgaagatggaagcaaatgtgaagcttctcaggaagaagatagaagcgaatctgaagattcaatgagtgacggcagaagctaa

SEQ ID NO: 234 - protein, 2116 aa, Capsicum chinense
MEMVTNILSPVAEHLIIPPVVRQIGYLFYYRRNIRSLDEESNKLENIRSGVNQRVEAARRNLQVISPNVEAWLTSVDTTTADVAVVMGGRTEVERGCIYGWCPTLKSRYLLSRRAKKITLEVTKLQKEGNEYAVFCYPVPADEIEAIPSNTNEEFVSRKQKEEEVMTALKDEEITIVGICGMGGVGKTSLAEKVRARAKQERLFNDVVMVTVSQQQDLKRIQGEIAGEVGLTSLQGDNLLSRGDQLRARLMQEGSRVLVILDDVWEALDDLEKLGIPTGSNHNYQCKVALTTRRQDVCDAMKAQKTVDVVILSDEEAWVLFRQKAGYSADDPSLSEVAKEVAKECKGLPLAIVIVAGALKTKTKPSWDDALVELRKASPKNIPRVLTKVYQPLKTSYDHLESDEARYVFLLCSLFEEDSDIWTEELLKYGVGLGIFSELENLECARNRVCNLLETLKNCFLLSQGKDKNYVKMHDVVRDVAIYIASEGEHKFLVNHNVNSNVFLRKVSYEQYSHMSIVANKFDERPTPIFCPRLKLLMLKLRFEEGFKLQDDFFDGMSELSVIKLSGYDRNSILPFPSSIQRLSNLSTLWLSNLRLDDVSIIGKLVTLEILSIRGSDLQELPVEIGNLANLTMLEYWNTGYRKRMRISPGVLSRLVRLEELHMVGVEDCSYSTLRELESLSRLTALAFDECSVDVIYSNLGLSSKLTRYALKMGRHYTFTSFMETYNKAIDLDVTKGTPLGDWICLLLRNSEVVHSRGKGSKNVMVELQNVKDLMLSDCDSLNIHYQNNISFPELERLEVRYCDYLRHLFCVSLACPDEGTSRRTHIRPDVIKFPNLHSLTLRNLEFFTHFYSDTVEGIEFPLLRVIYLRGLPEFQNFWPTANNAITDSNPLFNEKVSCPNLKVLKLHEANSITALCSHQLPTTYFSKLETLKVENCGKLRHLMSPSVARGLLNLRILLLEYCESMEEVIIEEEQEGDEIMCNEPLFPQLEELELQNLPKLRHFILTKQALEFPFLIEVKIRNCPEMKMLVQRRFVSTSSLKSVNNDDELKVVDLNKAMFNSKVSCPNLKVLKLHEANNITALCSHQLPTTYFSKLETLEVENCGKLRHLMSPSVARGLLNLRILLLGYCESMEEVIIEEEQEGEENMTNEPLFPLLEELILDKLPKLGHFFLTKRALEFPFLREVKIRKCPEMKMLVQQRSVSTSSLKSVNNDDELKVVDLNKAMFNSKVSCPNLKVLKLHEANSITALCSHQLPTTYFSKLETLEVENCGKLRHLMSPSVARGLLNLRILLLGYCESMEEVIIEEEQEGEENMTNEPLFPLLEELILDKLPKLGHFFLTKRALEFPFLREVKIRKCPEMKMLVQQRSVSTSSLKSVNNDDELKVVDLNKAMFNSKVSCPNLKVLKLHEANNITALCSHQLPTTYFSKLETLEVENCGKLRHLMSPSVARGLLNLRILLLGYCESMEEVIIEEEQEGEENMTNEPLFPLLEELILDKLPKLGHFFLTKRALEFPFLREVKIRKCPEMKMLVQQRSVSTSSLKSVNNDDELKVVDLNKAMFNSKVSCPNLKVLKLHEANNITALCSHQLPTTYFSKLETLEVENCGKLRHLMSPSVARGLLNLRILLLGYCESMEEVIIEEEQEGEENMTNEPLFPLLEELILDKLPKLGHFFLTKRALEFPFLREVKIRKCPEMKMLVQQRSVSTSSLKSVNNDDELKVVDLNKAMFNSKVSCPNLELLRLYKANSVGSLFSHQLPTTYFSKLETLEVENCGKLRHLMSPSVARGLLNLRILILRDCESMEEVITEEEQEGDEIMCNEPLFPQLEELKLENLPKLRHFILTKQALEIPFLIEVQIRNCPEMKMLVQQRSVSTSSLKSVNNDDELKVVDLNKAMFNSKVSCPNLELLRLYKANSVGSLFSHQLPTTYFSKLMQLGIRNCGKLRHLMSPSVARGLLNLRILILGDCESMEEVITEEEQEGEENMTNESLFPCLEMLKLENLPKLGHFFLTKRALEFPFLREVKIRTCPEMKIFVQHGSVSTPSLEIVNNDDEVKVDDLNEWIHQRFNSKEEDGSESESSQEEDGSESEASHEDGSKCEASQEEDRSESEDSMSDGRS

SEQ ID NO: 235 - DNA, 1404 bp, Artificial Sequence
  cDNA
atgtcttcaagtgtttatgagtcgatcattcagacaagagcttcagtctggggatcaactgcatctggtaaagctgttgtagattcttactggattcacgaacttggtactggttctcaactagttcagacccagctgtattctgattcaagaagcaaaagtagctttggctatactgcaaaagtaggggatcttccttgtgaagaagaagagattctttctcagcatgtgtatatccccatttttgatgatattgattttagcatcaatattgatgactctgttctggcactatctgtttgctcaaatacagtcaatgctaacggagtgaaacatcaaggtcacttgaaggttttgtctcctgctcagctccactctattggatctatcatgaacagatctgatattacagaccgattccagctccaagaaaaagacataattcccaatgacagatacattgaagctgcaaacaaaggctctttgtcttgtgtcaaagagcatacctataagatcgagatgtgctataatcaagctttaggcaaagtgaatgttctatctcctaacagaaatgtccatgaatggctgtacagtttcaagccaaatttcaatcaagttgaaagcaacaacagaactgtgaattctcttgcagtgaaatctctgctcatgtcagcagaaaacaacatcatgcctaactctcaagcttttgtcaaagcttccactgattctcatttcaagctgagcctctggctaagggttccaaaggttttgaagcagatttccattcagaaattgttcaaagttgcaggagatgagacaaataaaacattttatttatctattgcctgcattccaaaccataacagtgttgagacagctttaaacattactgttatttgcaagcatcagcttccaattcgtaaatgtaaagctccttttgaattatcaatgatgttttctgatttaaaggagccttacaacattgttcatgatccttcatatccccaaaggattgttcatgctttgcttgaaactcacacatcttttgcacaggttctttgcaacaacttgcaagaagatgtgatcatctacaccttgaacaaccatgagctaacttctggaaagctagatttaggtgaaagaaccttgaattacagtgaagatgcctacaaaaggaaacatttcctttcaaaaacacttgaatgtcttccatctaacacacaaactatgtcttatttagacagcatccaaattccttcctggaagatagactttgccaggggagaaattaaaatttctccgcaatctatttcagttgcaaaatctttgttaaagcttgatttaagcgggatcaaaaagaaagaatctaagattgaggaagcatatgcttcaggatcaaaatga

SEQ ID NO: 236 - protein, 467 aa, Tomato spotted wilt virus
MSSSVYESIIQTRASVWGSTASGKAVVDSYWIHELGTGSQLVQTQLYSDSRSKSSFGYTAKVGDLPCEEEEILSQHVYIPIFDDIDFSINIDDSVLALSVCSNTVNANGVKHQGHLKVLSPAQLHSIGSIMNRSDITDRFQLQEKDIIPNDRYIEAANKGSLSCVKEHTYKIEMCYNQALGKVNVLSPNRNVHEWLYSFKPNFNQVESNNRTVNSLAVKSLLMSAENNIMPNSQAFVKASTDSHFKLSLWLRVPKVLKQISIQKLFKVAGDETNKTFYLSIACIPNHNSVETALNITVICKHQLPIRKCKAPFELSMMFSDLKEPYNIVHDPSYPQRIVHALLETHTSFAQVLCNNLQEDVIIYTLNNHELTSGKLDLGERTLNYSEDAYKRKHFLSKTLECLPSNTQTMSYLDSIQIPSWKIDFARGEIKISPQSISVAKSLLKLDLSGIKKKESKIEEAYASGSK

SEQ ID NO: 237 - DNA, 3741 bp, Artificial Sequence
  cDNA
atggctgaaaatgaaattgaggaaatgttagagcacctgagaaggatcaagagtggaggtgatctggattggctcgacatattgcgaattgaggaacttgaaatggtgctaagagtttttagaacctttacaaagtataatgatgttcttttgcctgattccttagtcgaactcacaaagagggccaaattgattggggaaatacttcaccggttgtttggtaggattccacataaatgtaaaactaaccttaatctagaaaggctagaatcacatttgttggaattctttcaaggtaatacggcaagtttaagtcacaattatgagttgaataattttgatctgtcgaaatatatggattgtctggaaaattttctaaatgatgtactgatgatgttcttgcaaaaggataggttcttccattccagagaacaacttgcaaaacatcgatcaataaaggaactgaaaattgttcaaaagaaaataagatttttgaaatacatatatgccacagagataaatggttatgtcgactatgagaagcaggaatgtttggagaatcgaattcagttcatgactaacactgtgggacaatattgtttggcagtattagattatgtcactgagggtaaacttaatgaagaaaatgacaactttagtaaacctccttacctattatcattgattgtgttagtggagctggaaatgaagaagatttttcatggtgaagtaaaggcttcaaagtttactcaatcaaaaactttcaaggacaagaaattaccaaaaggattttcacatcatctccacaatctgttgatgtatctcagaaacaaaaagctcgagaattttcctaataatatcgctgctcaaaatattgatgtggcaatagagttcttgttggttttccttgatgctgatgtgtcaaatcatgttattaatggtaactggttgaaaaaggtcttgttaaaggttggagctatagcgggtgatattctatatgtaattcaaaagcttcttcctagatcaataaacaaagatgaaactagcaacataagtctttgctcaatacagatattggagaagactaaagatctgaaggcacaagttgagacgtactacaaatccttaaaatttactccatctcagttccccacctttggtggattgagctttctgaattctcttttaaggaaactgaatgagatgtcgacatctaagtccggattaggtttcctgatgaaacctcttttagggaatttggagaaagagctatcatctcttacatccattttagagaaggagctctcatccattttccgtgatgtcgtgcaccatgaacataacattcctaaagatcttcagaggcgtaccatcaatttgtcatatgaggctgaggttgctattgattctattcttgctcagtataatgcttttttgcatattttttgctcacttcctacaattgtaaaagagatcaagcaaattaatgcagaggtgactgagatgtggtcagcggacattcctcttaatcctcactatgtggctgctccattaaaacatctgccggatcgacatagcaatcttgtaactgatgaggaggtagtgggttttgagaataaagcagaagaactaattgattatctgattagaggtacaaatgagctagacgttgtcccaattgtaggcatgggaggacaagggaaaacgacaattgctagaaagttgtacaataatgacattattgtttctcgctttgatgttcgagcatggtgcatcatttctcaaacgtataatcggagagagttattacaagatattttcagtcaagttacaggttccgacgacaatggagctacggttgatgttcttgccgacatgttgaggagaaaattaatgggaaagagatatctcattgtattggatgatatgtgggattgtatggtatgggatgacttaaggctttcttttccagatgatggaattagaagcagaatagtcgtaacaactcgacttgaagaagtgggtaagcaagtcaagtaccatactgatccttattctcttccattcctcacaacagaagagagttgccaattgttgcagaaaaaagtgtttcaaaaggaagattgcccgcctgaactacaagatgtgagtcaagcagtagcagaaaaatgcaaaggactgcccctagtggttgtcttggtagctggaataatcaaaaaaaggaaaatggaagaatcttggtggaatgaggtgaaagatgctttatttgactatcttgacagtgagttcgaagaatacagtctggcaactatgcagttgagttttgataacttaccccactgtttaaagccttgtcttctttatatgggaatgttttcggaggacgcaagaattccagcatctacattgataagtttatggattgctgaaggattcgtggagaacactgaatctgggagattaatggaagaggaagctgaaggttacttgatggatctcattagcagtaacttggtaatgctttcaaagagaacttataagggtagagtcaaatactgtcaggttcatgatgttgtgcatcacttttgcttggaaaagagtagagaagcaaagtttatgcttgcagtgaagggtcaatatatccattttcaaccttcggattggaagggaactcgagtgagcttcagttttagtgaagagctttccaagtttgcatctctggtctccaaaacacagaagcctttccatcaacacttgaggtcattgataacgaccaatcgagcaaaatctattaatgatattttctcctgtcagattagtgaattgcgacttcttaaagtcttggatttgagttcttatattgtggagtttttgtcgttagctacattcaaaccactaaatcagctgaagtacctcgcagttcaggcttttgaattctattttgatccaggatcacatcttccccatatagaaactttcattgtaatgaatcttccttattatgatatattgttaccagtgtctttttgggaaatgaaaaaattaaggcatgctcattttggtaaggctgaatttgacaagcaggggctctctgaaggatcctctaaattggaaaatttgaggatattaaagaatattgttggatttgatagggtggatgtgttatcaaggaggtgtcctaatcttcaacaacttcaaatcacatattttgggaataatgaagagcctttttgtcccaaattggagaatcttacccagcttcaacaacttcaactttcctttgcgcgtccccgcactctatccgggttacagttgccttcaaatttaaataagttggtacttgaaggaattcatataggatgtgttattcccttcattgcgggactaccaagcctggaatatctccagttacatgatgtgtgttttcctcaatcagaagagtggtgccttggagatatcacgttccataaacttaagttgttgaaactggtaaagttaaatatatcaaggtgggatgtctcagaggaatcatttccgttgcttgaaacactcgttataaagaagtgcattgacctagaggagattccacttagctttgctgatattccaacattggaacagattaaattgattgggtcctggaaagtatctctggaggattcagctgtgagaatgaaggaagaaatcaaagacactgaaggatgtgatcgtttacacctcgtcaaacaacgctcagattga

SEQ ID NO: 238 - protein, 1246 aa, Solanum lycopersicum
MAENEIEEMLEHLRRIKSGGDLDWLDILRIEELEMVLRVFRTFTKYNDVLLPDSLVELTKRAKLIGEILHRLFGRIPHKCKTNLNLERLESHLLEFFQGNTASLSHNYELNNFDLSKYMDCLENFLNDVLMMFLQKDRFFHSREQLAKHRSIKELKIVQKKIRFLKYIYATEINGYVDYEKQECLENRIQFMTNTVGQYCLAVLDYVTEGKLNEENDNFSKPPYLLSLIVLVELEMKKIFHGEVKASKFTQSKTFKDKKLPKGFSHHLHNLLMYLRNKKLENFPNNIAAQNIDVAIEFLLVFLDADVSNHVINGNWLKKVLLKVGAIAGDILYVIQKLLPRSINKDETSNISLCSIQILEKTKDLKAQVETYYKSLKFTPSQFPTFGGLSFLNSLLRKLNEMSTSKSGLGFLMKPLLGNLEKELSSLTSILEKELSSIFRDVVHHEHNIPKDLQRRTINLSYEAEVAIDSILAQYNAFLHIFCSLPTIVKEIKQINAEVTEMWSADIPLNPHYVAAPLKHLPDRHSNLVTDEEVVGFENKAEELIDYLIRGTNELDVVPIVGMGGQGKTTIARKLYNNDIIVSRFDVRAWCIISQTYNRRELLQDIFSQVTGSDDNGATVDVLADMLRRKLMGKRYLIVLDDMWDCMVWDDLRLSFPDDGIRSRIVVTTRLEEVGKQVKYHTDPYSLPFLTTEESCQLLQKKVFQKEDCPPELQDVSQAVAEKCKGLPLVVVLVAGIIKKRKMEESWWNEVKDALFDYLDSEFEEYSLATMQLSFDNLPHCLKPCLLYMGMFSEDARIPASTLISLWIAEGFVENTESGRLMEEEAEGYLMDLISSNLVMLSKRTYKGRVKYCQVHDVVHHFCLEKSREAKFMLAVKGQYIHFQPSDWKGTRVSFSFSEELSKFASLVSKTQKPFHQHLRSLITTNRAKSINDIFSCQISELRLLKVLDLSSYIVEFLSLATFKPLNQLKYLAVQAFEFYFDPGSHLPHIETFIVMNLPYYDILLPVSFWEMKKLRHAHFGKAEFDKQGLSEGSSKLENLRILKNIVGFDRVDVLSRRCPNLQQLQITYFGNNEEPFCPKLENLTQLQQLQLSFARPRTLSGLQLPSNLNKLVLEGIHIGCVIPFIAGLPSLEYLQLHDVCFPQSEEWCLGDITFHKLKLLKLVKLNISRWDVSEESFPLLETLVIKKCIDLEEIPLSFADIPTLEQIKLIGSWKVSLEDSAVRMKEEIKDTEGCDRLHLVKQRSD

SEQ ID NO: 239 - DNA, 909 bp, Artificial Sequence
  cDNA
atgttgacttttttcagcaataaggggtcttctaagtctgccaaaaaggatgaaggtcctttagtttcactagctaaacataatggtaatgtagaagtctcaaaaccatggtcttcttctgatgaaaagcttgctttgactaaagctatggatacatccaaaggaaagatactgttgaacacagagggaacatcttcctttggaacctatgaatctgattctatcacagaatcagagggttatgatctttctgcaagaatgatagtagatacaaaccatcatatctcaaactggaaaaatgatctttttgttggcaatgggaagcagaacgctaataaggtcatcaagatctgtccaacttgggacagcagaaaacaatacatgatggtttccaggattgtgatatgggtctgccccactataccaaaccctacagggaaacttgtggttgccctagttgatcccaacatgccatctgaaaagcaagtcattctgaagggtcaagggacaataactgatcctatatgttttgtcttttatctgaactggtctattccaaaaataaacaacactccagaaaactgctgtcagctgcatttgatgtgcagccaagaatacaagaaaggggtttcttttggtagtgtcatgtattcttggacaaaggagttttgtgattcacccagagctgataaagataaaagttgtgtggttatacctctaaacagagctattagagctagatctcaagcattcattgaggcttgcaagctgataattcctaaaggaaacagtgagaagcagatcaaaaaacagcttaaagagttgagctcaaatcttgagagatcagttgaagaagaagaggaagggatttctgatagtgttgctcagttatcttttgatgaaatatag

SEQ ID NO: 240 - protein, 302 aa, Tomato spotted wilt virus
MLTFFSNKGSSKSAKKDEGPLVSLAKHNGNVEVSKPWSSSDEKLALTKAMDTSKGKILLNTEGTSSFGTYESDSITESEGYDLSARMIVDTNHHISNWKNDLFVGNGKQNANKVIKICPTWDSRKQYMMVSRIVIWVCPTIPNPTGKLVVALVDPNMPSEKQVILKGQGTITDPICFVFYLNWSIPKINNTPENCCQLHLMCSQEYKKGVSFGSVMYSWTKEFCDSPRADKDKSCVVIPLNRAIRARSQAFIEACKLIIPKGNSEKQIKKQLKELSSNLERSVEEEEEGISDSVAQLSFDEI

SEQ ID NO: 241 - DNA, 3390 bp, Artificial Sequence
  cDNA
atggcactagaattggttggtggtgctcttctttctgctttccttcaggttgcgtttgagaagcttgcttctcctcaagttctggacttctttcgtggaagaaagcttgatgaaaagctgctcaacaacttggaaatcaagctgaactccatacaggctctggctgatgatgcagaactaaagcagttcagagatccacctgtcaggaactggcttcttaaggtcaaagatgctttgtttgacgcagaggatctcttggatgaaatacaacatgagatctccaaatgccaggtcgaagctgaagctgaagctgagtctcaaacctgcacttgcaaggtaccaaatttcttcaaatcttctcctgttggttcctttaacaaggaaattaaatcaaggatggaacaggtccttgaggaccttgaaaatcttgctagccaaagtggctatctaggtttgcaaaatgcaagtggtgttggatcaggatttggtggtgcagtatcactgcattcagaatcaacatctttggttgttgaaagtgttatttatggcagagatgatgacaaagaaatgatctttaattggctcacatctgacattgacaattgtaacaaactatcaatactttctattgtgggcatgggtgggttgggtaagaccacacttgcccaacatgtattcaatgacccaaggatagaaaataaatttgatatcaaagcttgggtctgtgtttcagatgaatttgatgttttcaatgtaacaagaacaattctggaggcagtcactaaatcaactgatgatagtagaaaccgagaaacggttcagggaaggttgagagaaaaattgacaggaaataaattttttcttgttttggatgatgtttggaacagaaatcaaaaggaatggaaagatttgcaaactcctcttaattatggggcttcagggagtaaaattgttgtcactacacgtgacaagaaagttgcttcaatagtgggatcaaataaaacacattgcttagagctgttgcaagatgatcattgctggcgattgttcactaaacatgcattccgagatgatagtcatcaaccaaatccagacttcaaggagattggtacgaagatagtagaaaaatgtaaaggactgcctctggccttgacaacaattggaagtctattacaccaaaaatcatctatttcagaatgggaaggcatattgaaaagcgagatatgggaattttcagaagaggatagctctattgtccctgctttagcactaagctatcaccaccttccttcccatctcaagagatgttttgcttattgcgccttattccccaaagattacaggtttgacaaggagggtttaattcagctgtggatggcggaaaactttttacaatgtcatcaacagagtaggagtccagaaaaagtcggtgaacaatacttcaacgatcttttgtcaaggtccttatttcaacaatcaagcaccgtagagagaacaccttttgtcatgcatgaccttctcaatgatttggcaaaatatgtttgtggggacatctgcttcaggttggaaaatgatcaagcaacaaatataccgaagacaacccgtcatttttcagttgcaagcgatcacgttacatgctttgatgggtttcgaactttatacaatgctgaaaggttacgcacatttatgtcattaagtgaggaaatgagttttcgtaactacaatccttggtattgcaagatgtcaacacgtgaattattttccaagtttaagttcttacgtgtcttatctctgtctggttattataacctaacaaaggtgcctaactctgtgggtaatcttaaatatctcagttcgttagacttatcccatactgaaatagtaaaactacctgaatcaatatgttcactctacaacttgcaaatactgaagctaaatggttgtgaacatttgaaggagctgccctcaaatttgcataaactcactgatttgcatcgccttgaattaatagatactgaagtgagaaaggtaccagcacatttgggaaaactgaagtatcttcaagtattaatgagttcgtttaatgttggcaaaagtagggagttcagtatccagcagctaggagaactcaatcttcatggaagtctatcaataaggcaactgcagaatgttgagaatccatcagatgcattagcggtggatttaaaaaataaaacacaccttgtcgagctagagttagaatgggattcagactggaaccctgatgattcaacaaaagaaagggatgtaatcgagaatctacagccttccaaacacttggagaagttgacgatgagcaactatgggggtaaacaatttccaaggtggttattcaacaattcattattgcgtgtggtatccttaaccttgaagaactgtaaaggtttcctatgtttgcctccccttggacgtttgccatctctgaaggagctttcaattgaagggcttgatgggattgtgagtattaatgctgattttttcgggagtagctcttgttcatttacatccttggaatctttggagttctccgatatgaaggaatgggaagaatgggaatgtaaaggtgtgacaggtgcttttccacgtcttcaacgtctttctataatgcgttgtcccaagctgaaagggcacttgccagagcaactatgtcatttaaattatctaaagatttctgggtgggactctctaacgactattccgctagatatcttcccaatactcaaggagcttcagatctgggagtgtcctaatctacagaggatttcacaggggcaggctcttaatcatctcgagactctgagtatgagagagtgcccccaattagaatcattgcctgaaggaatgcatgtcctccttccatctcttgattctctgtggatagatgattgtccaaaagttgaaatgtttcccgaaggaggtttgccatcaaatttaaaaagtatgggtctctatggtggtagttacaaacttatctccttattgaaaagtgccttgggaggcaatcactctctagaaaggttagttattggaggagtggatgttgagtgtcttcctgacgaaggtgtactgccacactctcttgttaatctatggataagggagtgtggagatctaaaaagactggactacaaaggtctctgccacctctcctctctcaagacattgactctttgggactgccccaggctccaatgcttaccagaggagggtctgcccaaatccatttcaactttgggaattctcaattgtccgttgctcaaacaacgttgccgggaacccgaaggcgaagactggccaaagattgctcacattaaacgcgtgtggttattaggtaatgatgttgatgtttaa

SEQ ID NO: 242 - protein, 1129 aa, Glycine max
MALELVGGALLSAFLQVAFEKLASPQVLDFFRGRKLDEKLLNNLEIKLNSIQALADDAELKQFRDPPVRNWLLKVKDALFDAEDLLDEIQHEISKCQVEAEAEAESQTCTCKVPNFFKSSPVGSFNKEIKSRMEQVLEDLENLASQSGYLGLQNASGVGSGFGGAVSLHSESTSLVVESVIYGRDDDKEMIFNWLTSDIDNCNKLSILSIVGMGGLGKTTLAQHVFNDPRIENKFDIKAWVCVSDEFDVFNVTRTILEAVTKSTDDSRNRETVQGRLREKLTGNKFFLVLDDVWNRNQKEWKDLQTPLNYGASGSKIVVTTRDKKVASIVGSNKTHCLELLQDDHCWRLFTKHAFRDDSHQPNPDFKEIGTKIVEKCKGLPLALTTIGSLLHQKSSISEWEGILKSEIWEFSEEDSSIVPALALSYHHLPSHLKRCFAYCALFPKDYRFDKEGLIQLWMAENFLQCHQQSRSPEKVGEQYFNDLLSRSLFQQSSTVERTPFVMHDLLNDLAKYVCGDICFRLENDQATNIPKTTRHFSVASDHVTCFDGFRTLYNAERLRTFMSLSEEMSFRNYNPWYCKMSTRELFSKFKFLRVLSLSGYYNLTKVPNSVGNLKYLSSLDLSHTEIVKLPESICSLYNLQILKLNGCEHLKELPSNLHKLTDLHRLELIDTEVRKVPAHLGKLKYLQVLMSSFNVGKSREFSIQQLGELNLHGSLSIRQLQNVENPSDALAVDLKNKTHLVELELEWDSDWNPDDSTKERDVIENLQPSKHLEKLTMSNYGGKQFPRWLFNNSLLRVVSLTLKNCKGFLCLPPLGRLPSLKELSIEGLDGIVSINADFFGSSSCSFTSLESLEFSDMKEWEEWECKGVTGAFPRLQRLSIMRCPKLKGHLPEQLCHLNYLKISGWDSLTTIPLDIFPILKELQIWECPNLQRISQGQALNHLETLSMRECPQLESLPEGMHVLLPSLDSLWIDDCPKVEMFPEGGLPSNLKSMGLYGGSYKLISLLKSALGGNHSLERLVIGGVDVECLPDEGVLPHSLVNLWIRECGDLKRLDYKGLCHLSSLKTLTLWDCPRLQCLPEEGLPKSISTLGILNCPLLKQRCREPEGEDWPKIAHIKRVWLLGNDVDV

SEQ ID NO: 243 - DNA, 1197 bp, Artificial Sequence
  cDNA
ggtgaagtgcaacagagaatgaagtgtgaaacagcacttataacaagcattttcaaacctaagagaatgattcaaatccttgaaaatgacccatacattctcttgatgggcttggtttcaccttctatcttgattcacatgtatcgtatgaagcattttgagaaaggggtggagttgtggataagtaaagaacatagtgtggcaaagattttcatcatattggaacaactcactaagagggtcgctgcaaatgatgtgctacttgagcaactcgaaatgatctcagaaacttctgagaggttcatgagtatcttagaggattgccctcaagcaccacattcatacaagacagcaaaagatttgttgacaatgtacatagaaagaaaagcatccaacaaccaattggtggagaatggttttgtagacatgaatgacaaattgtacatggcatatgaaaaaatctactcagatcgcttgaagcaggaatggcgcgcattaagctggttggaaaaattttctataacatggcaattgaaaagatttgctccacatacggagaaatgtttgacaaagaaagttgtagaagaaagcagcgcatcttcaggaaactttgcgagtgtgtgcttcatgaatgcccagtcacacctaagaaatgtaagaaatacacttttccaaaaatgtgaccaggtttggactgcatcggtgcgagcctttgtgaagctcataatttcaacacttcacaggtgctacagtgatatagtttatctggtaaacatctgtataatcttttcattgcttgtccaaatgactagtgtactgcagggcattgtcaacacagtaaggagagacaaagcactcttaagtggatggaaaaggaaagaagatgaagaggccgtgattcatttgtatgaaatgtgtgaaaagatggaaggtggacatccaagtattgagaaatttttggaccatgtcaagggagttagacctgatctactccctgtggcagtaagcatgacaggacaatcagaagatgtctccgcacaggccaaaacagcaactcaattgcaacttgagaaaattgtggcattcatggctttgttgaccatgtgtattgataatgaaaggagtgatgcggttttcaaagtattgagcaagttaaaggcatttttcagcacaatgggtgaggatgttaaagtgcag

SEQ ID NO: 244 - protein, 399 aa, Soybean mosaic virus
GEVQQRMKCETALITSIFKPKRMIQILENDPYILLMGLVSPSILIHMYRMKHFEKGVELWISKEHSVAKIFIILEQLTKRVAANDVLLEQLEMISETSERFMSILEDCPQAPHSYKTAKDLLTMYIERKASNNQLVENGFVDMNDKLYMAYEKIYSDRLKQEWRALSWLEKFSITWQLKRFAPHTEKCLTKKVVEESSASSGNFASVCFMNAQSHLRNVRNTLFQKCDQVWTASVRAFVKLIISTLHRCYSDIVYLVNICIIFSLLVQMTSVLQGIVNTVRRDKALLSGWKRKEDEEAVIHLYEMCEKMEGGHPSIEKFLDHVKGVRPDLLPVAVSMTGQSEDVSAQAKTATQLQLEKIVAFMALLTMCIDNERSDAVFKVLSKLKAFFSTMGEDVKVQ

SEQ ID NO: 245 - DNA, 3834 bp, Artificial Sequence
  cDNA
atggctgcctctgccgcactcgtttttgcagggaaatctgtggcgacttcggccatatccttcttggtcaacaaggctttcagctacatcgatgagtactgcaagtccgaaaacatggatgagttgaagaatcggctcctgcgggccatgccacatatccaggcggtgttcgatgtcgtcaacccggaacttgtcagggagcagagcagcggcctcgacgcgtggctctggcagctcagggacgcggtcgaggcggcggaggacgccatcgatgagcttgaatactacgagctcgaggagaaggccaaggaccaaaaggttagtgaatggggttcccctcttggtaagatgaagcacaagtttgtcagatcttttggccctgctatcaacaagactatcaagaaaattagtcaccgtgacactctgaagaggttgatgaaatctgtggatgatttagacaaggctgccgtaggtgttagtgatttcctcaagctcacagaccatctcagtggaggttcttctaccagcagccagcagctcatggacaatgatcgccagactagttcaacatcaagtgcaaccaattttgttggacgagaaaaggagaaagaacagattattgggtggctagccaacacctcagatgaattgggtgaaactatggtcataaagaccaatagtattccaattatttcagttattggtcatggtggcatggggaagactgccttggctcagagcatatgtggtcaagatgaggtagtaaagcattttaaggtcatctggaccaccatatctactagctttgatgcgacatcggtgacaagtaaaatactggaagacgctacgcgcgtgaaaccgagcagcgatcatttggaaccactacaacgggacctcaaagagaaactcgcatccattaattttttgttagttctagatgacgtttgggaagataagaagagagatgaatgggagaagttatttgctcctctgaaggaactgaacactactgggagcaaaattctgttgacaacccgaatgcaatctgtagcagacatggctgcaaaggtgatgggagtcgaaagggataagttcttgacattacaaggactggaagatgataaaaatctcaagctcttcggtcatcatgccttttccggtttgaatccaagagatgatgcatatttgatgttaattggagaacaaattgcaaagaaactgaggggatgtcccctggtaacgaaggttgtcgccgagcacctgcaaagcaatataacacctgaatactggaggaaattcttgcatcaaggattggaacattttaaaggaaccgaaaaagatattatgaaggttctcagattgagctattaccacttaccaacagagctacagatttgctttcggtactgttgcctatttccgcaggactatatatttgaaaagaaagagttggtgcaaatgtggattggttcaggattgattgcaagtggcattcaatctttggaggatactgcagaacagttcttggctcagctaactagaaagtcgttctttgataagaaacctatatgggcacaaagtgaattttatgtaatgcatgacctgatgcatgaattagcaagcaatgtgtccaccggtgaatgtgcaagaatagttgaccctgttcaacttcaagatgagaagtatacagtccgacacctatgcattgccaatattcacagtttctctgctgatgaggtcaagaaaatctcccattttaagaatctgcgcactattatcattgattgtatgccgccacttgaaaatgatactctttgcgcacttcaaatgatagttgagacctcaaaatcactgcgactattccactctgcacaattatggaacacatcccgttttgctgtcaattttggtaacttaaaacatcttcgctatatctgcgtgagttcgataccacaagacaagatatgtggggtcgcaagactttatcacttgatggtccttcaccatggttcttctgggaccaaaatagatgaagcaagatatttagggaaccttgaacgtttgcggtatgtatcctatggtgtgcatggatttggtaatttccccataagcaggctcacttctcttcaggaattacataattaccgggtagaagaaagaacatgcaaccaaataagtgcagttgggagcttaagagatcttcgtagattgggtctgcagggtcttgagaatgtcaagaattgggaagaagctaagaatgccaagttgaaggaaaaacaatatctcaactcattatttatggagtggtcgacacctgatcaaatcatgacagataacttagttcttgaccaccttgagccacatgttaatatcagagaattgcaaattgggggttatccaggtctcaaaattccatcttggatcgagaactgctcagtcagaaacttgatatcactcaagttgataagctgcataaattgggactacattccctctctctgccagttggtattgctggagcttttagtgttggacaatcttcctaagctacggcagattggtcgatcatctgatatgtccaagagtagttccatggagttgttgttacctcaaagccttaatactttggaagtaagcaaatgccagaaactgagggaattaccacttctgcctccaagcctaatatcattgaaaatacacgatgtttggctgaccaagtttcctattattggcaaggtatcgagtgagagcatcgagtcaaaatcatctaagttgattaacgtaagggtcaccaactgtcctcatttaacttcgttggaagggagccttttggagcaaaaactgtacatgggaactcttcgtgtcctaacaattgttgattgtaaacatctggagtccgcatccataccatttgaagaaatgaaacaacttaaggaacttgcagtaatgcaatgtccaaagttgaggacgatgagagatgccaaagataagcttgtgccatcgtcactaagagaactagctattggcgggtgtggtgacctggaacttccactacttgggtcactgcagctgctcaccaacctatctgggctcgagctgcagaactgctcgagcctgttatctctcccctccgcggatgtgttcaagagtttcaggtcgctgcagaacatacatgtaacgcgatgcgagaatctctcgtccctgggagggctcggatcactgtcatcccttcagcagttagctatctccaagtgcagtaaactcacggaggctgggtcttccttgctatctggttctggtgatgcagaagagcatctggtggagcccggcaactcactgcggataagtgttcttagcttagatctgccgtccttgctgcttcatgagcctctcaagagtctgtgccacactgaatatttatgcattaatggctgttcagagacgaagagcttacctgaacgatggctgctacagaaccgctcatccctccgacacctgggtatactgaaagcagaatccttggaatcgctcccaccgagcatgcaagacctttgctctctcaagtcattataccttgatggtgctctgctactccgatcacttccatatcttccctcctccttgaagaatctgaacattacggaatgccatccagacctggagaagaagatcacaaaacatggaagctctgaattgaacaagattgcccacatccctgatgtgacaataggaggttggcatttccttatgggcaagaaattcagcagagaggcttaccataaactgagtgatagtgaccgcaacagatttatgtccgagtcgtcgttgcactag

SEQ ID NO: 246 - protein, 1277 aa, Triticum aestivum
MAASAALVFAGKSVATSAISFLVNKAFSYIDEYCKSENMDELKNRLLRAMPHIQAVFDVVNPELVREQSSGLDAWLWQLRDAVEAAEDAIDELEYYELEEKAKDQKVSEWGSPLGKMKHKFVRSFGPAINKTIKKISHRDTLKRLMKSVDDLDKAAVGVSDFLKLTDHLSGGSSTSSQQLMDNDRQTSSTSSATNFVGREKEKEQIIGWLANTSDELGETMVIKTNSIPIISVIGHGGMGKTALAQSICGQDEVVKHFKVIWTTISTSFDATSVTSKILEDATRVKPSSDHLEPLQRDLKEKLASINFLLVLDDVWEDKKRDEWEKLFAPLKELNTTGSKILLTTRMQSVADMAAKVMGVERDKFLTLQGLEDDKNLKLFGHHAFSGLNPRDDAYLMLIGEQIAKKLRGCPLVTKVVAEHLQSNITPEYWRKFLHQGLEHFKGTEKDIMKVLRLSYYHLPTELQICFRYCCLFPQDYIFEKKELVQMWIGSGLIASGIQSLEDTAEQFLAQLTRKSFFDKKPIWAQSEFYVMHDLMHELASNVSTGECARIVDPVQLQDEKYTVRHLCIANIHSFSADEVKKISHFKNLRTIIIDCMPPLENDTLCALQMIVETSKSLRLFHSAQLWNTSRFAVNFGNLKHLRYICVSSIPQDKICGVARLYHLMVLHHGSSGTKIDEARYLGNLERLRYVSYGVHGFGNFPISRLTSLQELHNYRVEERTCNQISAVGSLRDLRRLGLQGLENVKNWEEAKNAKLKEKQYLNSLFMEWSTPDQIMTDNLVLDHLEPHVNIRELQIGGYPGLKIPSWIENCSVRNLISLKLISCINWDYIPSLCQLVLLELLVLDNLPKLRQIGRSSDMSKSSSMELLLPQSLNTLEVSKCQKLRELPLLPPSLISLKIHDVWLTKFPIIGKVSSESIESKSSKLINVRVTNCPHLTSLEGSLLEQKLYMGTLRVLTIVDCKHLESASIPFEEMKQLKELAVMQCPKLRTMRDAKDKLVPSSLRELAIGGCGDLELPLLGSLQLLTNLSGLELQNCSSLLSLPSADVFKSFRSLQNIHVTRCENLSSLGGLGSLSSLQQLAISKCSKLTEAGSSLLSGSGDAEEHLVEPGNSLRISVLSLDLPSLLLHEPLKSLCHTEYLCINGCSETKSLPERWLLQNRSSLRHLGILKAESLESLPPSMQDLCSLKSLYLDGALLLRSLPYLPSSLKNLNITECHPDLEKKITKHGSSELNKIAHIPDVTIGGWHFLMGKKFSREAYHKLSDSDRNRFMSESSLH

SEQ ID NO: 247 - DNA, 4406 bp, Triticum aestivum
atggctgcctctgccgcactcgtttttgcagggaaatctgtggcgacttcggccatatccttcttggtcaacaaggctttcagctacatcgatgagtactgcaagtccgaaaacatggatgagttgaagaatcggctcctgcgggccatgccacatatccaggcggtgttcgatgtcgtcaacccggaacttgtcagggagcagagcagcggcctcgacgcgtggctctggcagctcagggacgcggtcgaggcggcggaggacgccatcgatgagcttgaatactacgagctcgaggagaaggccaaggaccaaaaggttagtgaatggggttcccctcttggtaagatgaagcacaagtttgtcagatcttttggccctgctatcaacaagactatcaagaaaattagtcaccgtgacactctgaagaggttgatgaaatctgtggatgatttagacaaggctgccgtaggtgttagtgatttcctcaagctcacagaccatctcagtggaggttcttctaccagcagccagcagctcatggacaatgatcgccagactagttcaacatcaagtgcaaccaattttgttggacgagaaaaggagaaagaacagattattgggtggctagccaacacctcagatgaattgggtgaaactatggtcataaagaccaatagtattccaattatttcagttattggtcatggtggcatggggaagactgccttggctcagagcatatgtggtcaagatgaggtagtaaagcattttaaggtcatctggaccaccatatctactagctttgatgcgacatcggtgacaagtaaaatactggaagacgctacgcgcgtgaaaccgagcagcgatcatttggaaccactacaacgggacctcaaagagaaactcgcatccattaattttttgttagttctagatgacgtttgggaagataagaagagagatgaatgggagaagttatttgctcctctgaaggaactgaacactactgggagcaaaattctgttgacaacccgaatgcaatctgtagcagacatggctgcaaaggtgatgggagtcgaaagggataagttcttgacattacaaggactggaagatgataaaaatctcaagctcttcggtcatcatgccttttccggtttgaatccaagagatgatgcatatttgatgttaattggagaacaaattgcaaagaaactgaggggatgtcccctggtaacgaaggttgtcgccgagcacctgcaaagcaatataacacctgaatactggaggaaattcttgcatcaaggattggaacattttaaaggaaccgaaaaagatattatgaaggttctcagattgagctattaccacttaccaacagagctacagatttgctttcggtactgttgcctatttccgcaggactatatatttgaaaagaaagagttggtgcaaatgtggattggttcaggattgattgcaagtggcattcaatctttggaggatactgcagaacagttcttggctcagctaactagaaagtcgttctttgataagaaacctatatgggcacaaagtgaattttatgtaatgcatgacctgatgcatgaattagcaagcaatgtgtccaccggtgaatgtgcaagaatagttgaccctgttcaacttcaagatgagaagtatacagtccgacacctatgcattgccaatattcacagtttctctgctgatgaggtcaagaaaatctcccattttaagaatctgcgcactattatcattgattgtatgccgccacttgaaaatgatactctttgcgcacttcaaatgatagttgagacctcaaaatcactgcgactattccactctgcacaattatggaacacatcccgttttgctgtcaattttggtaacttaaaacatcttcgctatatctgcgtgagttcgataccacaagacaagatatgtggggtcgcaagactttatcacttgatggtccttcaccatggttcttctgggaccaaaatagatgaagcaagatatttagggaaccttgaacgtttgcggtatgtatcctatggtgtgcatggatttggtaatttccccataagcaggctcacttctcttcaggaattacataattaccgggtagaagaaagaacatgcaaccaaataagtgcagttgggagcttaagagatcttcgtagattgggtctgcagggtcttgagaatgtcaagaattgggaagaagctaagaatgccaagttgaaggaaaaacaatatctcaactcattatttatggagtggtcgacacctgatcaaatcatgacagataacttagttcttgaccaccttgagccacatgttaatatcagagaattgcaaattgggggttatccaggtctcaaaattccatcttggatcgagaactgctcagtcagaaacttgatatcactcaagttgataagctgcataaattgggactacattccctctctctgccagttggtattgctggagcttttagtgttggacaatcttcctaagctacggcagattggtcgatcatctgatatgtccaagagtagttccatggagttgttgttacctcaaagccttaatactttggaagtaagcaaatgccagaaactgagggaattaccacttctgcctccaagcctaatatcattgaaaatacacgatgtttggctgaccaagtttcctattattggcaaggtatcgagtgagagcatcgagtcaaaatcatctaagttgattaacgtaagggtcaccaactgtcctcatttaacttcgttggaagggagccttttggagcaaaaactgtacatgggaactcttcgtgtcctaacaattgttgattgtaaacatctggagtccgcatccataccatttgaagaaatgaaacaacttaaggaacttgcagtaatgcaatgtccaaagttgaggacgatgagagatgccaaagataagcttgtgccatcgtcactaagagaactagctattggcgggtgtggtgacctggaacttccactacttgggtcactgcagctgctcaccaacctatctgggctcgagctgcagaactgctcgagcctgttatctctcccctccgcggatgtgttcaagagtttcaggtcgctgcagaacatacatgtaacgcgatgcgagaatctctcgtccctgggagggctcggatcactgtcatcccttcagcagttagctatctccaagtgcagtaaactcacggaggctgggtcttccttgctatctggttctggtgatgcagaagagcatctggtggagcccggcaactcactgcggataagtgttcttagcttagatctgccgtccttgctgcttcatgagcctctcaagagtctgtgccacactgaatatttatgcattaatggctgttcagagacgaagagcttacctgaacgatggctgctacagaaccgctcatccctccgacacctgggtatactgaaagcagaatccttggaatcgctcccaccgagcatgcaagacctttgctctctcaagtcattataccttgatggtgctctgctactccgatcacttccatatcttccctcctccttgaagaatctgaacattacggaatgccatccagacctggagaagaagatcacaaaacatggaagctctgaattgaacaagattgcccacatccctgatgtgacaataggtaactccgcccttccactctcgtcctcacttgcttaatttactgcttggacctctgtactgctgaaacctactgatcctgatctgactgtgaaccgatgacaggaggttggcatttccttatgggcaagaaattcagcagagaggcttaccataaactgaggtaattaataatcttctgagaaagacattcaatagtatcctctttttgctctgaataagggttggtgcgcaaagtgctatggcagacactcatatataatggcacaacacccccgcatggccgcattgcacgaaatatgatcaacgaactgaccatgcaaaacatatcaatatatgacggcgaacacatagcaaaacctggtgtaagctcacagactcactagataagacccctatcaaagaattgagagttgtaaaaggagagtaatcgtatcttttgcttctccttgagcagcattttattaccattgcaaccgtactgttgaagtgcaactatgcttattcatatcctaggatacgtttccattttagtatttgacactccaaatgcatgctatcatttatttccccttgccgcaaacaaatatctttgttcttgaaaactgaaacttctgtttttggtcatcagtgatagtgaccgcaacagatttatgtccgagtcgtcgttgcactag

SEQ ID NO: 248 - DNA, 360 bp, Artificial Sequence
  cDNA
atgagaccattccaacttttgtctgctattgcagtcttcaatagtttgaagatagtagcgggtgaatcttattgggattgtaagggtattccaattttatttcgaactgtccatgctgcggtggaattggcttttacttcgcagccaggttctattagtggttacccctcaatttgccgtacaacacctctacggactggaccagacgaacgtcgacagtttccactaacagatactggcgcaaggtggcaaggaggaggtataacctattacgttgaagccactagagataagagacattgcgaagtctttggaacagcaggaggtgtctataaatgtacattagttctgcgagactag

SEQ ID NO: 249 - protein, 119 aa, Blumeria graminis
MRPFQLLSAIAVFNSLKIVAGESYWDCKGIPILFRTVHAAVELAFTSQPGSISGYPSICRTTPLRTGPDERRQFPLTDTGARWQGGGITYYVEATRDKRHCEVFGTAGGVYKCTLVLRD

SEQ ID NO: 250 - DNA, 413 bp, Blumeria graminis
atgagaccattccaacttttgtctgctattgcagtcttcaatagtttgaagatagtagcgggtgaatcttattgggattgtaagggtattccaattttatttcgaactgtccatgctgcggtggaattggcttttacttcgcagccaggttctattagtggttacccctcaatttgccgtacaacacctctacggactggaccagacgaacgtcgacagtttccactaacagatactggcgcaaggtggcaaggttggttatttggttctcttccaccaatgaaaacacgctaataattttggtaggaggaggtataacctattacgttgaagccactagagataagagacattgcgaagtctttggaacagcaggaggtgtctataaatgtacattagttctgcgagactag

SEQ ID NO: 251 - DNA, 4248 bp, Artificial Sequence
  cDNA
atggcagagcgggtggtcaccatggcgatcgggccactggtgtccatgctgaaggacaaggcgtccagctacctcctggaccagtacaaggtcatggagggaatggaggagcagcacaagattctcaaacgcaagcttccggccatcctcgacgtcatcaccgatgtcgaggagcaggccatggcacagagagaaggtgccaaagcctggcttcaggagctcaggacagtcgcctatgtggcaaatgaagtcttcgacgaattcaagtacgaagccctacgccgtgaagccaagaagaatgggcactacataaagctcggcttcgatgtaattaaactcttccctactcacaaccgtgttgcgttccgttacaaaatgggtcgcaagctttgcctgattctgcaagccgttgaggtcctcatagcagagatgcaggtctttgggttcaagtaccaaccacagccaccggtgtccaaagagtggaggcatacagattatgttagcattgacccacaagaaattgccagcagatccagacacgaagataagaagaacattattggtatactagttgatgaagctagcaatgcagatctcacagttgttcctgtggttgcaatggggggccttggcaagaccacattagcgcaactcatatacaatgatcctgaaattcagaagcatttccagttgctgctctgggtttgtgtctctgatacctttgatgtgaactccctggccaagagtatagttgaagcatcccccaataagaatgttgatacagacaaaccaccattggatagacttcaaaaactggtcagcggacagcggtatctccttgtattggatgatgtttgggacaacaaagagttacgtaagtgggaaaggctgaaggtatgtctccagcatggtggcatgggcagtgcagtgttgacaacaactcgtgataaacgagtttctgaaattatgggtgcagatagagctgcctacaatctcaatgctttggaggatcacttcataaaggaaattattgaggctagagcgttcagttcaaagaaagaaaagcctattgaactagtggaggtagttgacgagattgtgaagagatgttgtggctctccattagctgcaacggcactgggctctgtactttgtaccaagaccagtgtgaaagaatggaaagctgtatcatctggaaccagcgtttgcactgaggaaactggaatcttgccaatactcaagcttagctacaacgatttgccatcgcacatgaagcagtgctttgctttttgtgctgtatttccaaaggattacaagattgatgtagcgaagttgatccaactatggatcgcaaatggctttatccctgaacacaaggaagatagtcttgaaaccattggacaacttatttttgatgagcttgcttcaaggtcattctttctggatatagagaagagtaaagaagactgggagtattattccagaacaacatgtaaaatccacgatcttatgcatgatattgcaatgtctgttatggaaaaggaatgtgttgttgcaactatggaaccaagtgaaattgagtggcttccagatactgctcggcatttgttcttgtcatgtgaagaaacggaacgtattttgaatgattctatggaggaaagatcccctgctattcaaacattgctatgtgatagtaatgtgttcagcccattgaagcatctatcaaaatatagctctttgcacgccttgaagctctgtattagaggcacagaatcatttctactcaaaccaaagtatctgcatcacctgaggtaccttgatctctcagaaagtcgtatgaaagcacttcctgaggatataagtattctatataacctgcaagtgttggacctttcctactgtaattatcttgatcgacttccaaggcaaatgaagtatatgacttccctctgccacctctacactcatggatgtcggaacttgaagagcatgcctccaggacttgaaaatctcactaagctgcagacactcacagtttttgtagcaggagttcctggccctgattgcgctgatgttggagagctgcatggtctaaacattggtggtcggctagagctatgccaggtagagaatgttgaaaaagcagaagcagaagtggcaaaccttggtggtcagctagagctgcagcatttaaaccttggtgatcagctagagctacgccgggtagagaatgttaaaaaagcagaggcaaaagtggcgaatcttggaaacaagaaggatctccgtgaactgacattaagatggactgaggttggcgacagcaaggtgctcgacaagttcgaacctcatggtgggctgcaggttctgaagatatataaatatggagggaagtgtatgggtatgttgcaaaacatggttgagatccatctttctggttgtgaaagattgcaggttttgttcagttgtggtacatccttcacgtttccaaaactgaaggtgcttacactagagcatttattggattttgagagatggtgggaaataaatgaggcacaagaagaacagataatatttcctctgcttgagaagttgtttattcggcattgtggaaagctgatagcattacctgaagcaccattgcttggagaaccaagtcgtggaggtaatagactggtatgcacaccattttctctgcttgagaacttgtttatttggtattgtggaaagctggtaccattgcgtgaagcaaggttggttcatgaaaattgtagtggaggttatagattggtacagtcagcatttcctgctctaaaggtacttgcattggaagacttggagagttttcagaaatgggatgcagctatcgaaggagaaccgatattgtttcctcaacttgagacactatcagttcagaaatgcccaaagctagtagatttacccgaagcaccaaaactcagtgtactagtaattgaagatggcaagcaagaggtgttccattttgtagacaggtatttatcttcattgaccaatctgacactgaggctagaacacagagaaacaacatcagaggctgaatgcacttcaattgtacctgtggacagcaaagagaaatggaaccagaaatcccctcttacagttctggagttaggatgctgcaactcattctttggaccaggtgcactagagccgtgggactattttgtacaccttgaaaagttggaaattgatagatgtgatgtgctcgtccactggccagagaaagtgttccaaagcttggtatcgttgaggagattagtgattagaaactgcgaaaatctgactggatatgcacaagctcctcttgagccattggcatccgaaaggagtgaacacctgagaggtctggagtctcttcgcatagaaaactgcccaagtttagtagagatgttcaacgtcccggcatctctcaagaaaatggatattcttgagtgcgataagcttgagtccatattcggcaagcaacagggcatggcagagttagtccaagtatcttctagcagtgaggcaatcatgcctgcaactgtatcagagttgccatccacacccatgaatcacttttgtccatgcctagaagatctatgcttatcagcatgtggaagcttaccagcggttctaaatctgcctccatccttaaagaccttagaaatggatcgttgtagtagtattcaagtcctatcatgccagctgggtgggctccagaaaccagaagccactacctccagaagcagaagtcctatcatgccacagccactagcagcagcaacagcaccagctgcaagagagcatttacttcctccccatctcgaatatctaacaatactgaactgtgctggcatgttgggtgggactctccgtctgcctgcacccctcaagagactgttcattatgggcaacagtgggctgacatcgctggagtgtctgtcgggagagcaccccccatcgctgaaaatccttgatcttagaagctgcagtaccctggcatccctgccgaatgagccgcaagtatacaggtctctctggtctcttgaaattacaggctgccctgctataaagaagctccctagatgcctgcagcagcaactgggcagcatcaaacgcaaatggctagatgcccgttatgaagtaacggaattcaaaccattgaaaccgaagacatggaaggaaataccgaggctagtccgtgagcggaggcaggcctgccggagctga

SEQ ID NO: 252 - protein, 1415 aa, Triticum aestivum
MAERVVTMAIGPLVSMLKDKASSYLLDQYKVMEGMEEQHKILKRKLPAILDVITDVEEQAMAQREGAKAWLQELRTVAYVANEVFDEFKYEALRREAKKNGHYIKLGFDVIKLFPTHNRVAFRYKMGRKLCLILQAVEVLIAEMQVFGFKYQPQPPVSKEWRHTDYVSIDPQEIASRSRHEDKKNIIGILVDEASNADLTVVPVVAMGGLGKTTLAQLIYNDPEIQKHFQLLLWVCVSDTFDVNSLAKSIVEASPNKNVDTDKPPLDRLQKLVSGQRYLLVLDDVWDNKELRKWERLKVCLQHGGMGSAVLTTTRDKRVSEIMGADRAAYNLNALEDHFIKEIIEARAFSSKKEKPIELVEVVDEIVKRCCGSPLAATALGSVLCTKTSVKEWKAVSSGTSVCTEETGILPILKLSYNDLPSHMKQCFAFCAVFPKDYKIDVAKLIQLWIANGFIPEHKEDSLETIGQLIFDELASRSFFLDIEKSKEDWEYYSRTTCKIHDLMHDIAMSVMEKECVVATMEPSEIEWLPDTARHLFLSCEETERILNDSMEERSPAIQTLLCDSNVFSPLKHLSKYSSLHALKLCIRGTESFLLKPKYLHHLRYLDLSESRMKALPEDISILYNLQVLDLSYCNYLDRLPRQMKYMTSLCHLYTHGCRNLKSMPPGLENLTKLQTLTVFVAGVPGPDCADVGELHGLNIGGRLELCQVENVEKAEAEVANLGGQLELQHLNLGDQLELRRVENVKKAEAKVANLGNKKDLRELTLRWTEVGDSKVLDKFEPHGGLQVLKIYKYGGKCMGMLQNMVEIHLSGCERLQVLFSCGTSFTFPKLKVLTLEHLLDFERWWEINEAQEEQIIFPLLEKLFIRHCGKLIALPEAPLLGEPSRGGNRLVCTPFSLLENLFIWYCGKLVPLREARLVHENCSGGYRLVQSAFPALKVLALEDLESFQKWDAAIEGEPILFPQLETLSVQKCPKLVDLPEAPKLSVLVIEDGKQEVFHFVDRYLSSLTNLTLRLEHRETTSEAECTSIVPVDSKEKWNQKSPLTVLELGCCNSFFGPGALEPWDYFVHLEKLEIDRCDVLVHWPEKVFQSLVSLRRLVIRNCENLTGYAQAPLEPLASERSEHLRGLESLRIENCPSLVEMFNVPASLKKMDILECDKLESIFGKQQGMAELVQVSSSSEAIMPATVSELPSTPMNHFCPCLEDLCLSACGSLPAVLNLPPSLKTLEMDRCSSIQVLSCQLGGLQKPEATTSRSRSPIMPQPLAAATAPAAREHLLPPHLEYLTILNCAGMLGGTLRLPAPLKRLFIMGNSGLTSLECLSGEHPPSLKILDLRSCSTLASLPNEPQVYRSLWSLEITGCPAIKKLPRCLQQQLGSIKRKWLDARYEVTEFKPLKPKTWKEIPRLVRERRQACRS

SEQ ID NO: 253 - DNA, 4448 bp, Triticum aestivum
atggcagagcgggtggtcaccatggcgatcgggccactggtgtccatgctgaaggacaaggcgtccagctacctcctggaccagtacaaggtcatggagggaatggaggagcagcacaagattctcaaacgcaagcttccggccatcctcgacgtcatcaccgatgtcgaggagcaggccatggcacagagagaaggtgccaaagcctggcttcaggagctcaggacagtcgcctatgtggcaaatgaagtcttcgacgaattcaagtacgaagccctacgccgtgaagccaagaagaatgggcactacataaagctcggcttcgatgtaattaaactcttccctactcacaaccgtgttgcgttccgttacaaaatgggtcgcaagctttgcctgattctgcaagccgttgaggtcctcatagcagagatgcaggtctttgggttcaagtaccaaccacagccaccggtgtccaaagagtggaggcatacagattatgttagcattgacccacaagaaattgccagcagatccagacacgaagataagaagaacattattggtatactagttgatgaagctagcaatgcagatctcacagttgttcctgtggttgcaatggggggccttggcaagaccacattagcgcaactcatatacaatgatcctgaaattcagaagcatttccagttgctgctctgggtttgtgtctctgatacctttgatgtgaactccctggccaagagtatagttgaagcatcccccaataagaatgttgatacagacaaaccaccattggatagacttcaaaaactggtcagcggacagcggtatctccttgtattggatgatgtttgggacaacaaagagttacgtaagtgggaaaggctgaaggtatgtctccagcatggtggcatgggcagtgcagtgttgacaacaactcgtgataaacgagtttctgaaattatgggtgcagatagagctgcctacaatctcaatgctttggaggatcacttcataaaggaaattattgaggctagagcgttcagttcaaagaaagaaaagcctattgaactagtggaggtagttgacgagattgtgaagagatgttgtggctctccattagctgcaacggcactgggctctgtactttgtaccaagaccagtgtgaaagaatggaaagctgtatcatctggaaccagcgtttgcactgaggaaactggaatcttgccaatactcaagcttagctacaacgatttgccatcgcacatgaagcagtgctttgctttttgtgctgtatttccaaaggattacaagattgatgtagcgaagttgatccaactatggatcgcaaatggctttatccctgaacacaaggaagatagtcttgaaaccattggacaacttatttttgatgagcttgcttcaaggtcattctttctggatatagagaagagtaaagaagactgggagtattattccagaacaacatgtaaaatccacgatcttatgcatgatattgcaatgtctgttatggaaaaggaatgtgttgttgcaactatggaaccaagtgaaattgagtggcttccagatactgctcggcatttgttcttgtcatgtgaagaaacggaacgtattttgaatgattctatggaggaaagatcccctgctattcaaacattgctatgtgatagtaatgtgttcagcccattgaagcatctatcaaaatatagctctttgcacgccttgaagctctgtattagaggcacagaatcatttctactcaaaccaaagtatctgcatcacctgaggtaccttgatctctcagaaagtcgtatgaaagcacttcctgaggatataagtattctatataacctgcaagtgttggacctttcctactgtaattatcttgatcgacttccaaggcaaatgaagtatatgacttccctctgccacctctacactcatggatgtcggaacttgaagagcatgcctccaggacttgaaaatctcactaagctgcagacactcacagtttttgtagcaggagttcctggccctgattgcgctgatgttggagagctgcatggtctaaacattggtggtcggctagagctatgccaggtagagaatgttgaaaaagcagaagcagaagtggcaaaccttggtggtcagctagagctgcagcatttaaaccttggtgatcagctagagctacgccgggtagagaatgttaaaaaagcagaggcaaaagtggcgaatcttggaaacaagaaggatctccgtgaactgacattaagatggactgaggttggcgacagcaaggtgctcgacaagttcgaacctcatggtgggctgcaggttctgaagatatataaatatggagggaagtgtatgggtatgttgcaaaacatggttgagatccatctttctggttgtgaaagattgcaggttttgttcagttgtggtacatccttcacgtttccaaaactgaaggtgcttacactagagcatttattggattttgagagatggtgggaaataaatgaggcacaagaagaacagataatatttcctctgcttgagaagttgtttattcggcattgtggaaagctgatagcattacctgaagcaccattgcttggagaaccaagtcgtggaggtaatagactggtatgcacaccattttctctgcttgagaacttgtttatttggtattgtggaaagctggtaccattgcgtgaagcaaggttggttcatgaaaattgtagtggaggttatagattggtacagtcagcatttcctgctctaaaggtacttgcattggaagacttggagagttttcagaaatgggatgcagctatcgaaggagaaccgatattgtttcctcaacttgagacactatcagttcagaaatgcccaaagctagtagatttacccgaagcaccaaaactcagtgtactagtaattgaagatggcaagcaagaggtgttccattttgtagacaggtatttatcttcattgaccaatctgacactgaggctagaacacagagaaacaacatcagaggctgaatgcacttcaattgtacctgtggacagcaaagagaaatggaaccagaaatcccctcttacagttctggagttaggatgctgcaactcattctttggaccaggtgcactagagccgtgggactattttgtacaccttgaaaagttggaaattgatagatgtgatgtgctcgtccactggccagagaaagtgttccaaagcttggtatcgttgaggagattagtgattagaaactgcgaaaatctgactggatatgcacaagctcctcttgagccattggcatccgaaaggagtgaacacctgagaggtctggagtctcttcgcatagaaaactgcccaagtttagtagagatgttcaacgtcccggcatctctcaagaaaatggatattcttgagtgcgataagcttgagtccatattcggcaagcaacagggcatggcagagttagtccaagtatcttctagcagtgaggcaatcatgcctgcaactgtatcagagttgccatccacacccatgaatcacttttgtccatgcctagaagatctatgcttatcagcatgtggaagcttaccagcggttctaaatctgcctccatccttaaagaccttagaaatggatcgttgtagtagtattcaagtcctatcatgccagctgggtgggctccagaaaccagaagccactacctccagaagcagaagtcctatcatgccacagccactagcagcagcaacagcaccagctgcaagagagcatttacttcctccccatctcgaatatctaacaatactgaactgtgctggcatgttgggtgggactctccgtctgcctgcacccctcaagagactgttcattatgggcaacagtgggctgacatcgctggagtgtctgtcgggagagcaccccccatcgctgaaaatccttgatcttagaagctgcagtaccctggcatccctgccgaatgagccgcaagtatacaggtctctctggtctcttgaaattacaggctgccctgctataaagaagctccctagatgcctgcagcagcaactgggcagcatcaaacgcaaatggctagatgcccgttatgaaggtatgcttgcagcacgtccttctatcttggccacatttaataaacagatgcagtcatccattccatcccttgtacataatggtcaacacgtttgcaaaagtttcttctccattatttgaatgccatcatgctatacattatgatataacacattagtttgtacaagtttttttttctgacatcgcttgtggtatgtgcagtaacggaattcaaaccattgaaaccgaagacatggaaggaaataccgaggctagtccgtgagcggaggcaggcctgccggagctga

SEQ ID NO: 254 - DNA, 393 bp, Artificial Sequence
  cDNA
atgagaaccttcagtcttgtgtcactggcggctattttaaattatctaacgcttccatctgccgttgggagtggccctgtcgctaacgcttcaagttacaagtgtcatgacagggtcattggtccggttaccttaaatgatcagatagaaaaggcatatagagaagcactagaagcaggcacttcacctaacggactaaggaaaggacagaaatttggttcaagatactttaatgtaatcttaaaaagaggagaagaaaatattaaagtcgaattttttgtgggaatcaactatttgaaggaaattatttatctacaggcttatgtccagagcgtattgctagattgttatccaacaacagagaggcctcaattaaacataattctgcactag

SEQ ID NO: 255 - protein, 130 aa, Blumeria graminis
MRTFSLVSLAAILNYLTLPSAVGSGPVANASSYKCHDRVIGPVTLNDQIEKAYREALEAGTSPNGLRKGQKFGSRYFNVILKRGEENIKVEFFVGINYLKEIIYLQAYVQSVLLDCYPTTERPQLNIILH

SEQ ID NO: 256 - DNA, 445 bp, Blumeria graminis
atgagaaccttcagtcttgtgtcactggcggctattttaaattatctaacgcttccatctgccgttgggagtggccctgtcgctaacgcttcaagttacaagtgtcatgacagggtcattggtccggttaccttaaatgatcagatagaaaaggcatatagagaagcactagaagcaggcacttcacctaacggactaaggaaaggacagaaatttggttcaagatactttaatgtaatcttaaaaagaggagaaggtatgaagtttcattccaaaaaactttatttcctactaattaatatcttcagaaaatattaaagtcgaattttttgtgggaatcaactatttgaaggaaattatttatctacaggcttatgtccagagcgtattgctagattgttatccaacaacagagaggcctcaattaaacataattctgcactag

SEQ ID NO: 257 - DNA, 4245 bp, Artificial Sequence
  cDNA
atggcagagcgggtggtcaccatggcgatcgggccactggtgtccatgctgaaggacaaggcgtccagctacctcctggaccagtacaaggtcatggagggaatggaggagcagcacaagattctcaaacgcaagcttccggccatcctcgacgtcatcaccgatgtcgaggagcaggccatggcacagagagaaggtgccaaagcctggcttcaggagctcaggacagtcgcctatgtggcaaatgaagtcttcgacgaattcaagtacgaagccctacgccgtgaagccaagaagaatgggcactacataaagctcggcttcgatgtaattaaactcttccctactcacaaccgtgttgcgttccgttacaaaatgggtcgcaagctttgcctgattctgcaagccgttgaggtcctcatagcagagatgcaggtctttgggttcaagtaccaaccacagccaccggtgtccaaagagtggaggcatacagattatgttagcattgacccacaagaaattgccagcagatccagacacgaagataagaagaacattattggtatactagttgatgaagctagcaatgcagatctcacagttgttcctgtggttgcaatggggggccttggcaagaccacattagcgcaactcatatacaatgatcctgaaattcagaagcatttccagttgctgctctgggtttgtgtctctgatacctttgatgtgaactccctggccaagagtatagttgaagcatcccccaataagaatgttgatacagacaaaccaccattggatagacttcaaaaactggtcagcggacagcggtatctccttgtattggatgatgtttgggacaacaaagagttacgtaagtgggaaaggctgaaggtatgtctccagcatggtggcatgggcagtgcagtgttgacaacaactcgtgataaacgagtttctgaaattatgggtgcagatagagctgcctacaatctcaatgctttggaggatcacttcataaaggaaattattgaggctagagcgttcagttcaaagaaagaaaagcctattgaactagtggaggtagttgacgagattgtgaagagatgttgtggctctccattagctgcaacggcactgggctctgtactttgtaccaagaccagtgtgaaagaatggaaagctgtatcatctggaaccagcgtttgcactgatgaaactggaattttgccaatactcaagcttagctacaacgacttgcccgcacacatgaagcagtgctttgctttctgtgctgtgtttcccaaggattacaagatcaatgtggagaagcttatccaactatggattgcaaacggctttatcctagaatacaaggaagatagtcccgaaacatttggaaaacatattttcgatgagcttgtctcaaggtcattctttctggacctagaggaaagtaaggactacagcgggtattattccagcacatgtaaaattcatgatcttatgcatgatattgcaatgtctgttatggaaaaggaatgtgttgttgcaactatggaaccaagtgaaattgagtggcttccagatactgctcggcatttgttcttgtcatgtgaagaagcagaacgtattttgaatgattctatggaggaaagatcccctgctattcaaacattgctatgtgatagtaatgtgttcagcccattgaagcatctatcaaaatatagctctttgcacgccttgaagctctgtattagaggcacagaatcatttctactcaaaccaaagtatctgcatcacctgaggtaccttgatctctcagaaagtcgtatgaaagcacttcctgaggatataagtattctatataacctgcaagtgttggacctttcctactgtaattatcttgatcgacttccaaggcaaatgaagtatatgacttccctctgccacctctacactcatggatgtcggaacttgaagagcatgcctccaggacttgaaaatctcactaagctgcagacactcacagtttttgtagcaggagttcctggccctgattgcgctgatgttggagagctgcatggtctaaacattggtggtcggctagagctatgccaggtagagaatgttgaaaaagcagaagcagaagtggcaaaccttggtggtcagctagagctgcagcatttaaaccttggtgatcagctagagctacgccgggtagagaatgttaaaaaagcagaggcaaaagtggcgaatcttggaaacaagaaggatctccgtgaactgacattaagatggactgaggttggcgacagcaaggtgctcgacaagttcgaacctcatggtgggctgcaggttctgaagatatataaatatggagggaagtgtatgggtatgttgcaaaacatggttgagatccatctttctggttgtgaaagattgcaggttttgttcagttgtggtacatccttcacgtttccaaaactgaaggtgcttacactagagcatttattggattttgagagatggtgggaaataaatgaggcacaagaagaacagataatatttcctctgcttgagaagttgtttattcggcattgtggaaagctgatagcattacctgaagcaccattgcttggagaaccaagtcgtggaggtaatagactggtatgcacaccattttctctgcttgagaacttgtttatttggtattgtggaaagctggtaccattgcgtgaagcaaggttggttcatgaaaattgtagtggaggttatagattggtacagtcagcatttcctgctctaaaggtacttgcattggaagacttggagagttttcagaaatgggatgcagctatcgaaggagaaccgatattgtttcctcaacttgagacactatcagttcagaaatgcccaaagctagtagatttacccgaagcaccaaaactcagtgtactagtaattgaagatggcaagcaagaggtgttccattttgtagacaggtatttatcttcattgaccaatctgacactgaggctagaacacagagaaacaacatcagaggctgaatgcacttcaattgtacctgtggacagcaaagagaaatggaaccagaaatcccctcttacagttctggagttaggatgctgcaactcattctttggaccaggtgcactagagccgtgggactattttgtacaccttgaaaagttggaaattgatagatgtgatgtgctcgtccactggccagagaatgtgttccaaagcttggtatccttgaggacattactgattagaaactgcaaaaatctgactggatatgcacaagctcctcttgagccgttggcgtctgaaaggagtcagcacccgagaggtctggagtctctttgcttaagaaactgcccaagtttagtagagatgttcaacgtcccggcatctctcaagaaaatgactattggtgggtgcattaagcttgagtccatattcggcaagcaacagggcatggcagagttagtccaagtatcttctagcagtgaggcaatcatgcctgcaactgtatcagagttgccatccacacccatgaatcacttttgtccatgcctagaagatctatgcttatcagcatgtggaagcttaccagcggttctaaatctgcctccatccttaaagaccttagaaatggatcgttgtagtagtattcaagtcctatcatgccagctgggtgggctccagaaaccagaagccactacctccagaagcagaagtcctatcatgccacagccactagcagcagcaacagcaccagctgcaagagagcatttacttcctccccatctcgaatatctaacaatactgaactgtgctggcatgttgggtgggactctccgtctgcctgcacccctcaagagactgttcattatgggcaacagtgggctgacatcgctggagtgtctgtcgggagagcaccccccatcgctgaaaatccttgatcttagaagctgcagtaccctggcatccctgccgaatgagccgcaagtatacaggtctctctggtctcttgaaattacaggctgccctgctataaagaagctccctagatgcctgcagcagcaactgggcagcatcaaacgcaaatggctagatgcccgttatgaagtaacggaattcaaaccattgaaaccgaagacatggaaggaaataccgaggctagtccgtgagcggaggcaggcctgccggagctga

SEQ ID NO: 258 - protein, 1414 aa, Triticum aestivum
MAERVVTMAIGPLVSMLKDKASSYLLDQYKVMEGMEEQHKILKRKLPAILDVITDVEEQAMAQREGAKAWLQELRTVAYVANEVFDEFKYEALRREAKKNGHYIKLGFDVIKLFPTHNRVAFRYKMGRKLCLILQAVEVLIAEMQVFGFKYQPQPPVSKEWRHTDYVSIDPQEIASRSRHEDKKNIIGILVDEASNADLTVVPVVAMGGLGKTTLAQLIYNDPEIQKHFQLLLWVCVSDTFDVNSLAKSIVEASPNKNVDTDKPPLDRLQKLVSGQRYLLVLDDVWDNKELRKWERLKVCLQHGGMGSAVLTTTRDKRVSEIMGADRAAYNLNALEDHFIKEIIEARAFSSKKEKPIELVEVVDEIVKRCCGSPLAATALGSVLCTKTSVKEWKAVSSGTSVCTDETGILPILKLSYNDLPAHMKQCFAFCAVFPKDYKINVEKLIQLWIANGFILEYKEDSPETFGKHIFDELVSRSFFLDLEESKDYSGYYSSTCKIHDLMHDIAMSVMEKECVVATMEPSEIEWLPDTARHLFLSCEEAERILNDSMEERSPAIQTLLCDSNVFSPLKHLSKYSSLHALKLCIRGTESFLLKPKYLHHLRYLDLSESRMKALPEDISILYNLQVLDLSYCNYLDRLPRQMKYMTSLCHLYTHGCRNLKSMPPGLENLTKLQTLTVFVAGVPGPDCADVGELHGLNIGGRLELCQVENVEKAEAEVANLGGQLELQHLNLGDQLELRRVENVKKAEAKVANLGNKKDLRELTLRWTEVGDSKVLDKFEPHGGLQVLKIYKYGGKCMGMLQNMVEIHLSGCERLQVLFSCGTSFTFPKLKVLTLEHLLDFERWWEINEAQEEQIIFPLLEKLFIRHCGKLIALPEAPLLGEPSRGGNRLVCTPFSLLENLFIWYCGKLVPLREARLVHENCSGGYRLVQSAFPALKVLALEDLESFQKWDAAIEGEPILFPQLETLSVQKCPKLVDLPEAPKLSVLVIEDGKQEVFHFVDRYLSSLTNLTLRLEHRETTSEAECTSIVPVDSKEKWNQKSPLTVLELGCCNSFFGPGALEPWDYFVHLEKLEIDRCDVLVHWPENVFQSLVSLRTLLIRNCKNLTGYAQAPLEPLASERSQHPRGLESLCLRNCPSLVEMFNVPASLKKMTIGGCIKLESIFGKQQGMAELVQVSSSSEAIMPATVSELPSTPMNHFCPCLEDLCLSACGSLPAVLNLPPSLKTLEMDRCSSIQVLSCQLGGLQKPEATTSRSRSPIMPQPLAAATAPAAREHLLPPHLEYLTILNCAGMLGGTLRLPAPLKRLFIMGNSGLTSLECLSGEHPPSLKILDLRSCSTLASLPNEPQVYRSLWSLEITGCPAIKKLPRCLQQQLGSIKRKWLDARYEVTEFKPLKPKTWKEIPRLVRERRQACRS

SEQ ID NO: 259 - DNA, 4445 bp, Triticum aestivum
atggcagagcgggtggtcaccatggcgatcgggccactggtgtccatgctgaaggacaaggcgtccagctacctcctggaccagtacaaggtcatggagggaatggaggagcagcacaagattctcaaacgcaagcttccggccatcctcgacgtcatcaccgatgtcgaggagcaggccatggcacagagagaaggtgccaaagcctggcttcaggagctcaggacagtcgcctatgtggcaaatgaagtcttcgacgaattcaagtacgaagccctacgccgtgaagccaagaagaatgggcactacataaagctcggcttcgatgtaattaaactcttccctactcacaaccgtgttgcgttccgttacaaaatgggtcgcaagctttgcctgattctgcaagccgttgaggtcctcatagcagagatgcaggtctttgggttcaagtaccaaccacagccaccggtgtccaaagagtggaggcatacagattatgttagcattgacccacaagaaattgccagcagatccagacacgaagataagaagaacattattggtatactagttgatgaagctagcaatgcagatctcacagttgttcctgtggttgcaatggggggccttggcaagaccacattagcgcaactcatatacaatgatcctgaaattcagaagcatttccagttgctgctctgggtttgtgtctctgatacctttgatgtgaactccctggccaagagtatagttgaagcatcccccaataagaatgttgatacagacaaaccaccattggatagacttcaaaaactggtcagcggacagcggtatctccttgtattggatgatgtttgggacaacaaagagttacgtaagtgggaaaggctgaaggtatgtctccagcatggtggcatgggcagtgcagtgttgacaacaactcgtgataaacgagtttctgaaattatgggtgcagatagagctgcctacaatctcaatgctttggaggatcacttcataaaggaaattattgaggctagagcgttcagttcaaagaaagaaaagcctattgaactagtggaggtagttgacgagattgtgaagagatgttgtggctctccattagctgcaacggcactgggctctgtactttgtaccaagaccagtgtgaaagaatggaaagctgtatcatctggaaccagcgtttgcactgatgaaactggaattttgccaatactcaagcttagctacaacgacttgcccgcacacatgaagcagtgctttgctttctgtgctgtgtttcccaaggattacaagatcaatgtggagaagcttatccaactatggattgcaaacggctttatcctagaatacaaggaagatagtcccgaaacatttggaaaacatattttcgatgagcttgtctcaaggtcattctttctggacctagaggaaagtaaggactacagcgggtattattccagcacatgtaaaattcatgatcttatgcatgatattgcaatgtctgttatggaaaaggaatgtgttgttgcaactatggaaccaagtgaaattgagtggcttccagatactgctcggcatttgttcttgtcatgtgaagaagcagaacgtattttgaatgattctatggaggaaagatcccctgctattcaaacattgctatgtgatagtaatgtgttcagcccattgaagcatctatcaaaatatagctctttgcacgccttgaagctctgtattagaggcacagaatcatttctactcaaaccaaagtatctgcatcacctgaggtaccttgatctctcagaaagtcgtatgaaagcacttcctgaggatataagtattctatataacctgcaagtgttggacctttcctactgtaattatcttgatcgacttccaaggcaaatgaagtatatgacttccctctgccacctctacactcatggatgtcggaacttgaagagcatgcctccaggacttgaaaatctcactaagctgcagacactcacagtttttgtagcaggagttcctggccctgattgcgctgatgttggagagctgcatggtctaaacattggtggtcggctagagctatgccaggtagagaatgttgaaaaagcagaagcagaagtggcaaaccttggtggtcagctagagctgcagcatttaaaccttggtgatcagctagagctacgccgggtagagaatgttaaaaaagcagaggcaaaagtggcgaatcttggaaacaagaaggatctccgtgaactgacattaagatggactgaggttggcgacagcaaggtgctcgacaagttcgaacctcatggtgggctgcaggttctgaagatatataaatatggagggaagtgtatgggtatgttgcaaaacatggttgagatccatctttctggttgtgaaagattgcaggttttgttcagttgtggtacatccttcacgtttccaaaactgaaggtgcttacactagagcatttattggattttgagagatggtgggaaataaatgaggcacaagaagaacagataatatttcctctgcttgagaagttgtttattcggcattgtggaaagctgatagcattacctgaagcaccattgcttggagaaccaagtcgtggaggtaatagactggtatgcacaccattttctctgcttgagaacttgtttatttggtattgtggaaagctggtaccattgcgtgaagcaaggttggttcatgaaaattgtagtggaggttatagattggtacagtcagcatttcctgctctaaaggtacttgcattggaagacttggagagttttcagaaatgggatgcagctatcgaaggagaaccgatattgtttcctcaacttgagacactatcagttcagaaatgcccaaagctagtagatttacccgaagcaccaaaactcagtgtactagtaattgaagatggcaagcaagaggtgttccattttgtagacaggtatttatcttcattgaccaatctgacactgaggctagaacacagagaaacaacatcagaggctgaatgcacttcaattgtacctgtggacagcaaagagaaatggaaccagaaatcccctcttacagttctggagttaggatgctgcaactcattctttggaccaggtgcactagagccgtgggactattttgtacaccttgaaaagttggaaattgatagatgtgatgtgctcgtccactggccagagaatgtgttccaaagcttggtatccttgaggacattactgattagaaactgcaaaaatctgactggatatgcacaagctcctcttgagccgttggcgtctgaaaggagtcagcacccgagaggtctggagtctctttgcttaagaaactgcccaagtttagtagagatgttcaacgtcccggcatctctcaagaaaatgactattggtgggtgcattaagcttgagtccatattcggcaagcaacagggcatggcagagttagtccaagtatcttctagcagtgaggcaatcatgcctgcaactgtatcagagttgccatccacacccatgaatcacttttgtccatgcctagaagatctatgcttatcagcatgtggaagcttaccagcggttctaaatctgcctccatccttaaagaccttagaaatggatcgttgtagtagtattcaagtcctatcatgccagctgggtgggctccagaaaccagaagccactacctccagaagcagaagtcctatcatgccacagccactagcagcagcaacagcaccagctgcaagagagcatttacttcctccccatctcgaatatctaacaatactgaactgtgctggcatgttgggtgggactctccgtctgcctgcacccctcaagagactgttcattatgggcaacagtgggctgacatcgctggagtgtctgtcgggagagcaccccccatcgctgaaaatccttgatcttagaagctgcagtaccctggcatccctgccgaatgagccgcaagtatacaggtctctctggtctcttgaaattacaggctgccctgctataaagaagctccctagatgcctgcagcagcaactgggcagcatcaaacgcaaatggctagatgcccgttatgaaggtatgcttgcagcacgtccttctatcttggccacatttaataaacagatgcagtcatccattccatcccttgtacataatggtcaacacgtttgcaaaagtttcttctccattatttgaatgccatcatgctatacattatgatataacacattagtttgtacaagtttttttttctgacatcgcttgtggtatgtgcagtaacggaattcaaaccattgaaaccgaagacatggaaggaaataccgaggctagtccgtgagcggaggcaggcctgccggagctga

SEQ ID NO: 260 - DNA, 564 bp, Beta vulgaris
  Bv123_#187
atgggaataataggagaaacaattctatcagcatttctacaagtgctgtttgagaagttattttcccgaggagtaaatttgtttatggggttagtgaaaggaggaatccaacaaaaaaccatcaaacaatgggagaaacaactaagaattatagaggcagttttaagtgatgctgagcaaaagcaagtccaaagcaatgctgtgaagtcatggatgcaggacctccaagatttggcgtatgacttagaagatgtgttggatgcatttgcaactcaagctcaaatttacgaattgtcgatcatgaatgatagtcatagctccgaattgaaagataatgacaccaagtttatggcggaaagcattattgttggcggttcaaaagctatagagcatttatcttttatgtttaactctggccaagatttttcggggaggatagaagagattagtcaacaattggaagaaattttaagccaaaccgagggtttagggctatcagttcatgtgatgcatcagcaagtagtacccacaacaacagcacaacgttggcaaagctggcgatga

SEQ ID NO: 261 - protein, 187 aa, Beta vulgaris
  Bv123_#187
MGIIGETILSAFLQVLFEKLFSRGVNLFMGLVKGGIQQKTIKQWEKQLRIIEAVLSDAEQKQVQSNAVKSWMQDLQDLAYDLEDVLDAFATQAQIYELSIMNDSHSSELKDNDTKFMAESIIVGGSKAIEHLSFMFNSGQDFSGRIEEISQQLEEILSQTEGLGLSVHVMHQQVVPTTTAQRWQSWR

SEQ ID NO: 262 - DNA, 531 bp, Beta vulgaris
  Bv165_#176
atggtgataggcggagagatttttctatcagcgtttcttcaagtgctctttgaaaagcttgcatcaggagggataagtctattcctaaaaagagaaaaaggaataggacctaaagttattcaaagatggaacaaaaaattgagattaatagaggcggttttaagtgacgccgagcaaaagcagtttcacaacaatgccgtcaaattgtggcttcgagatcttcaagagttcgcgtacgatttagaggacatcttagacgaatttgatacagatgctcgacttaaggagttcaatgatcagcctcagccacagccacaggaacatcaacccaaatcttcttgttctcctttcaataaggtacaaagctgtctttcttgtggtttcccaactttaaataagaaaactacaaagtattcaactagcattgaagagatgagcactcgcttggaagatcttctggaccaagtaaggtctttggctctctcaacgcagatacactcaagggtagagcaacatgaagaacggaggtga

SEQ ID NO: 263 - protein, 176 aa, Beta vulgaris
  Bv165_#176
MVIGGEIFLSAFLQVLFEKLASGGISLFLKREKGIGPKVIQRWNKKLRLIEAVLSDAEQKQFHNNAVKLWLRDLQEFAYDLEDILDEFDTDARLKEFNDQPQPQPQEHQPKSSCSPFNKVQSCLSCGFPTLNKKTTKYSTSIEEMSTRLEDLLDQVRSLALSTQIHSRVEQHEERR

SEQ ID NO: 264 - DNA, 468 bp, Solanum tuberosum
  StR3a-#1-155
atggagattggcttagcagttggtggtgcatttctctcttcagctttgaatgttctctttgataggcttgctcctcacggtgatctgctcaacatgtttcagaagcataaggatcatgttaagctcttaaagaagctggaggacattttgctcggtcttcagattgtgctaagtgatgcagagaataaacaagcatcaaatcgacatgtgagccagtggttcaataagcttcagaatgctgtggacggtgctgagaacttgatagaacaagtcaattatgaagctttgaggcttaaggtggaaggccagcatcaaaatcttgcagaaacaagcaaccagcaagtaagtgaccttaacctgtgcttcagtgatgatttctttcttaacataaaggataagttggaagaaaccattgaaacattggaggtgttggaaaagcaaattggtcgccttgtaatcactagctag

SEQ ID NO: 265 - protein, 155 aa, Solanum tuberosum
  StR3a-#1-155
MEIGLAVGGAFLSSALNVLFDRLAPHGDLLNMFQKHKDHVKLLKKLEDILLGLQIVLSDAENKQASNRHVSQWFNKLQNAVDGAENLIEQVNYEALRLKVEGQHQNLAETSNQQVSDLNLCFSDDFFLNIKDKLEETIETLEVLEKQIGRLVITS

SEQ ID NO: 266 - protein, 863 aa, Solanum demissum
MAEILLTAVINKSVEIAANVLFQQGSRLNFLKEDIDWLQRVLRHIRSYVDDAKAKEVGGDSRVKNLLKDIQELAGDVEDLLDEFLPKIQQSNKFKGAICCLKTVSFADEFAVEIEKIRRRVADIDSLRTTFNITDTSNNNNDCIPMEQRRKFLHADETEVIGLDDDFNKLQDKLLVQDLCNGVVSIVGMPGLGKTTLAKKLYRHVRHQFECSALVYVSQQPRAGEILLDIAKQVGLTDEGRKEHLEDNLRSLLETKRYVILLDDIWDTKIWDALNRVLRPECDSKIGSRIIITSRYHHVGRYIGEDFSLHELQPLDSEKSFELFTKKIFIFDNNNNWANASPVLVDIGKSIVRRCGGIPLAIVVTAGMLRARERTEHAWNRVLERIGHNIQDGCAKALALSYNDLPIALRPCFLYFGLYPEDHEIRAFDLTNMWIAEKLIVVNSGNGREAESLADDVLNDLVSRNLIQVAKRTYDGRISSCRIHDLLHSLCVDLAKESNFFHTEHNAFGDPGNVSRLRRITFYSDNNAMNEFFRSNPKLEKLRALFCFTKGDSCIFSHLAHHDFKLLQVLVVVQPRKNYDFSISQIKIGNMSCLRYLRFEGDIYGKLPNCMVKLKHLETLDISKSFIIKLPTGVWKTTQLRHLRSNGYNLAPYSYFCISPFFPNVPPNNVQTLMWMDGEFFEPRWLHRFINLRKLGLQEVSDSTIKKLSTLSPVPTTLEVLKLSSFFSELREQINLSSYPNIVKLHLNGRIPLNVSESFPPNLVKLTLCNLMVDGHVVAVLKKLPKLKILTLHRCRHDAEKMDLSGDGDSFPQLEVLHIKDPVCLSEVTCTDDVGMPKLKKLLLIERTDSNVRLSERLAKLRV

SEQ ID NO: 267 - protein, 147 aa, Phytophthora infestans
MRLAIMLSATAVAINFATSSAIDQTKVLVYGTPAHYIHDSAGRRLLRKNEENEETSEERAPNFNLANLNEEMFNVAALTKRADAKKLAKQLMGNDKLADAAYIWWQHNRVTLDQIDTFLKLASRKTQGAKYNQIYNSYMMHLGLTGY

SEQ ID NO: 268 - DNA, 9623 bp, Solanum tuberosum
  allele 7153: /note="n = a or c or g or t"
  allele 7619: /note="n = a or c or g or t"
ggatccttggacgacgtttaaacctagataatatgaaggttaggatacatgtcaccatgtctctttgtttttttactaattcaattaacttcagaaaccttgatgcatttgcaattccctttccagattgaaagtttgtatcctgaagaaatgggaccagatgtgatgcctctggaagactttctagtgaatggccttcccttacttgatcagaaaattgaagataggattaaacaagcttctgcaaatgggaatgttctgcgctatgtttgcttgattgatgatgcgaggtaattctttcatttcatttttagtttgctcaatggataatggcaactggatcttttattcttatcacgttctgcaagtcaccatacctctagacgcttaaagcaaagcttgctcactgatgggagtgttatggcaagttaaggtactgatgagtgatgagcataacaattactactaattaagacaagtttatcttagaagatagtctcaattcctcttaacaaatgctttagaaaattatgacagcagtcacccacttggacatataagtttgagagctatctgcaaacctgttgtaagttcatctgttttatgttagtcatctgatcagctgttcacctcttgtatccgtaaccaattaaagaatgagtcagaagtataaatttgtaatggcatagatggggaaaaattgattattgaaaacacttttgtgtacatgacattaacatctcacattttcagatgtgaagttggcatccaagaagttccaaaagattctgcattgggaaggttaagaggaagtgataatgtggtatgcattgttcactttcacctcccattttgctatttctttggtccctcttcttcttgttccattactttgttttccgttgggaattttcttgtaactgctatggaggttcaaccatatcatacgcgtcgcaatgtttaaagcccttttgtgatgtcatttagtgtagtgatgtattacttcatgctgtgatttaaagaattgctcatcttttacccatgcctaggctgacgccttactttgtctttactctttacgcatcatctggtgtcgccctgcaaaactttatgtagttaaggtctttgattctactttaatcgtaaaatgtttcccttgtacagttgtaattatgaggtcataaaaacagtaagattaatgatgattgagcgtctgcaattcgtttgtctgcaggtggagatatacagccgttgttacgagaaacaacctttggttatccaaggtgctggagcaggaaatgataccacagcagctggtgtcctagctgatatccttgacattcaagatttattcccttgacagagtattatacactgagatacaaacattcgatcctcaaaggacaaaaaatcgactcttcttgtccctctgcttccagattggagattgaattcaggctaagaaagctcacgcattttttgaaaaatttctcgatacacgagatgcctcgtcagcttacagtagattattacacaatttctctcgtacataaccgtctcaaatggaacagttcaaactgagtcatttgcctcagtgctggactagtttttaggatttttcttcagcttataatcagtttccttgtaatgaccattttctttataatctgaaaaactgctgatatttctttataatatttcttcagaaaaccttatgattgaacaccacaatattcaccttttcggtatttaatgttcctttatgttatgtgttcttctatttttcccttttttttttaaagttaatcgtcaattgggacatggacccagataaaaaccataatgacattaatatctctcaattgttgagataaaattatgaaaagagaaaaatcaattattaacctattcctatgactattatttgcatcttatgagaagagaaaagactttgaaatatgacgttggccttttcctttcttcgactgtcaactatacaaaaacaaggaattcagttctattaaattcaagattcaaaaatgatttcttttttattttggagccccgcccccccccccccctcccccctcttgcttcaattattgaattgcaaaagtaatgaatagtcatgaaaccaggctggcagactccataatgtttttgctactcttcttttttttctatggctgtgagccgtacactgtagataagacatagttgtaccacttacaagtaagaccactagcaaaagaaagagagaaatcattcttgatcacatatcactcttagctcttagcattcaacaggtaaataaagttgttagtaattgaagattgaaacatttatcttcttaaaatcattttgtgttctccttgttttgatttgcagatttcagtaatggagattggcttagcagttggtggtgcatttctctcttcagctttgaatgttctctttgataggcttgctcctcacggtgatctgctcaacatgtttcagaagcataaggatcatgttaagctcttaaagaagctggaggacattttgctcggtcttcagattgtgctaagtgatgcagagaataaacaagcatcaaatcgacatgtgagccagtggttcaataagcttcagaatgctgtggacggtgctgagaacttgatagaacaagtcaattatgaagctttgaggcttaaggtggaaggccagcatcaaaatcttgcagaaacaagcaaccagcaagtaagtgaccttaacctgtgcttcagtgatgatttctttcttaacataaaggataagttggaagaaaccattgaaacattggaggtgttggaaaagcaaattggtcgccttggcttaaaggaacattttggttcgactaaacaagaaactagaacaccttcaacttctttagttgatgactctgatatctttggaaggcagaatgatatagaggatttgattgaccgtttattatctgaagatgcaagtggaaaaaagcggactgtagttcctattgttggaatgggtggtctgggtaagacaacacttgctaaagcggtttacaatgatgagagagtgcagatacattttggtttgaaagcttggttttgtgtttctgaggcatttgatgctttcagaataacaaaagggttacttcaagaaattggctcatttgacttgaaggctgatgacaatcttaatcagctacaagtcaaattgaaggaaagattaaagggaaagaagtttcttatagttttggatgatgtgtggaatgacaactacaacaagtgggatgaattgagaaatgtttttgtacaaggagatataggaagtaagatcattgtgacgacacgtaaagagagtgttgccttgatgatgggaaatgagcaaattagcatggacaatttgtctactgaatcctcttggtctttatttaaaacacatgcatttgaaaacatgggtcctatgggacatccggaacttgaagaggtcgggaaacaaattgcagctaagtgcaaaggactgcccttagctctgaagacgctcgctggcatgttacgctccaaatcagaggttgaagagtggaaacgtattttgagaagtgaaatatgggagctgccacacaatgacatattaccagcgttgatgttgagctacaatgatcttcccgcacatttaaagcgatgtttttccttttgtgcaatatttcctaaagattatccctttaggaaagaacaagttattcatctgtggattgccaatggtctcgtaccacaggaagatgtaataattgaagattcaggcaaccaatactttctcgagttgaggtcaagatcattattcgaaagggtcccaaatccttctcaagggaacacagagaatttattcttaatgcatgaccttgtcaatgatttagcgcaaattgcatcttcaaaactttgtatcaggttggaagagagccaaggatctcatatgttggaacaaagtcaacacttatcatattcaatgggatatggtggtgagtttgagaaattgacacccctctacaaattggagcagctgaggacattgcttccgacatgtattgatctccctgattgttgtcaccatctaagcaagagggtgctacataacatactgccaagactaacatccttaagggcattatcgttgtcatgctatgagattgttgagttgccaaatgacttgtttatcaaattaaagctcctcagatttttggatatttctcggacagagattaaaaggttgccagattccatttgtgcattgtataacttagagacacttctcctgtcatcttgttatgatcttgaggagctaccgctgcagatggagaagctgattaacttgcgtcatcttgacataagcaacactcgtctcttgaagatgccgctacatctgagcaagttgaaaagcctccaagtgttagtgggagccaaatttcttataggtggtttgagaatggaagatttgggtgaagtacataacttgtacggatctctatcagttgtagagttgcaaaatgtggttgatagaagggaagctgtgaaggcaaagatgagggagaagaatcacgtcgacaggttatatttggagtggagtggaagtagtagtgccgacaattcacaaacagaaagagacatacttgatgagctacgcccccataaaaacataaaagtagtcaaaatcactggatatagagggacaaactttcccaattggctagctgatcctttgtttcttaagctggtaaaattgtctcttagaaactgcaagaactgttattcattgccagcactaggacaactcccttttctgaaattcctttcgattagagagatgcatggaataacagaggtgacggaagaattctatggcagttggtcctccaaaaagccttttaactgtcttgagaagcttgaatttaaagatatgccggagtggaagcaatgggacctactaggaagtggagagttccctatacttgagaagcttttgattgaaaattgccctgaactcagtttggagacggtacccatccaactttcaagtttaaaaagttttgacgtaattggttctcccttggttataaactttcctttaagcatactgcccactaccttgaagagaataaagatatctgattgccagaaattgaaattggaacagccaactggtgagattagtatgtttctggaggaattgacactgattaaatgtgattgtatagatgatatatcacctgagttactcccaagagcacgcaaattgtgggtacaggattggcacaaccttactaggtttttgattcctactgccactgaaactctcgatatttggaattgtgagaatgttgaaatactttcggtggcatgtggggggacccagatgacgtcactgactattgcctactgtaagaagctgaagtggctgccagaacgtatgcaggaactccttccatctcttaaggaactgcatctgtctaattgtccagaaatagagtcctttcctgaaggtggattgcccttcaatttacaacaacttgcgatcagatattgcaagaaactggtgaacggccgaaaggagtggcatttacagagacgactctgtctcacagcgttaatcatctaccatgatggcagtgacgaagagattgttggtggtgagaattgggagttgccttcctctattcaaaggcttaccatagtgaatctgaaaacattaagcagccaacatctcaaaaacctcacctctcttcaatatctatttattaggggtaatttacctcagattcagccaatgctggaacaaggccagtgttcgcacctcacttcgcttcaaagtctacaaatctcctccctccaatcacttcctgaatcggcactgccctcctccctctctcacctggagatctcccattgccctaatctccaatcacttcctgaatcggcactgccctcctccctctctcagctgaccatcaataattgccctaatctccaatcactttccgaatcaacactgccctcctccctctctcagctggagatctccttttgccctaatctccaatatcttccactaaaagggatgccctcttccctctctgaactatctatttacaaatgcccattgctcaaaccacaactagaatttgacaagggggaatactggccaaatattgctcaatttcccaccataaagatcgatagggaatgcatgtgatgattaaaacgaatggctcttcaacttatgtaagctattcttttcccttggaagctttttatttccgtttacttcactttgcttttttgttaattcttttcatttttaatcgctaattctaaaaacatgccttgcacgtttatcccaaaatatttcatataatttttgtatagcaaatgacatattttatccccttcaaatctattggtatttactaaaaaaatatccatcatttttacgattgaaagtacatatattttcctaataaaaagaatacacccttaattataaaattgattaaaagtgcataaagtaaaaataactaattgttgtacaaatacaatattcaaatgaggatactaaaataccacatgttaggttaatgtatacaaaacaactaaccaatgtaaattctcaatattaataaccataaaacaataaaaagttatacaataacaacaaacaagaaacataaacattaaaaaaaataaaaataaaaagagtcaagaaaagagagcatagagattctctttttttttcaatttgttttaactgtgtacaatattgtgtcaaatgtcactattcatagaataagattgaagaacacttaagagttgttatgaatataacattaatccatttgatcatggatgagaggtggtagtaaaaatcataatgaatataattagtgggagttgcatatatttacataatgaagagttagtggtaataaatctatgtaatatacttaacattaatacaaatatttatatacaaaaaagaatataatatagatctatatgatttttttccctttttgttaagggcaaacataaccattcatatttccaattggaagatgaacaaaacaaaaaattcatgaatttaactccagcatgaaattaanaaaaagaatacatattcaagaaactttatggtggttgattcatgtactaatatgatgatttactattaaatatttaatttattaaatagtttataacatttaaatttaatgtagaaatagaatcataatctaacttttgcctaacattctccccacttttagtcaattttcctttttgcattataatatggattgcacacaacaacttctatttaaaaaaggaaagacaaaattagaaaaaatagtatcaataaattggaatgaaaaatgtaaaattgtaataagaggaagagaagaaaaaatcagtagaatatatttacctaaccatgaataaggaagtatgttgagtaaaagaagagtaatgcaaaagtgtgagctgatatatggaggaaattgactaatataataatctgtattgaataatgaaaagaccaatctttaatttctgccaaatttttattacgagctcaagataatataaatttattaatttaataatgacataaataaataacatacattgtatgtatgtgtagttaatggggtagtgaaaaagactctttctaaaattatttttctctttaaagtatttttaaacttataatattagtgctatagaaaatgctatagaaaatcataagctactgcaagtttttatagtaattattttattaaattatatacctattatttataatcattccggaaatatataaacaattttggaaagcttgtaaaatgagaaattattatttcttatcgttattttagctattattaacatttagtatgacaacatttaaaaagtagcctcctttaaatattaacggtttctaaattaacgtagccaataatttgaaatgttttgacgttttgtttatctaaacacgcagaattttgtttttgaacttgaaacatgtaattttgccttgggtgaattataattttatttttactatttaattaattaaatattttataacattttaatataatgaactggtaaaatggtaatccaactttaaaggttggagcttcccacttttagtaatatatgatatatgatatatgatatatgatgatatatgatgttgttgtgctcatcatcaaacacatagctttatatttttgcttcatagagaatctaaattttttaaaagataatcagggataacgatcacaagttttaggaaataagtgcaacttccattgtcagaataagtagacgttatataattctatatttcttggatagcgaccagacaactacacagggcaatgcttgatgtaagagcttcagatatacatttgtagggtgtttatccaacgagtaataaaatcacagtcttctgatatcttctcttgcatatacttttgcaattttaaactttattttgaattgtgttgttgctaacttgaacatgttctgtgcttaatcagatgtggattttgaagggctagtacgacaagtctggtccatccattgtccacaagaagtgcttataaggtgttgctgctattttttacatatgttcatgagttcttttttatttttttgttctttccgctaaagttattatgtcatccacagtgaactcaggtctgctgttataggcaagtcttcgagatggggcaataccgctgatactatttcatgtttccagtgcaagcctcttttgtaagtagacaaactcgatttgtaaatatgtttgggactcaactagtggttagagtactgattttgtaagatttgtgtacgaaaaatcaaattagaaagataacttgcgatgattgaataagctcaaagaagtggatgtgaatttcaaatcgtgtcttttttttttcatgtgtgtgtgtgagaaatttgaagtgttgtttagatttgttggaatagtctaaatagattgtctctataaaatttgaagacatttgatggagatctgattagatgattttgaacaacaagtgcaactgaagatggatatgtatattattttcgtagttagcaacgtgttatatatttttatagtggatatattgttttctcattcagtgtttgatattcacattggagtccgactaaatttgaatttgcgcatttcaaggggcggcgttcttgacatgattttttccattctacggctcgtacgtgctcttaaattctaattaaggatagaaaaatctcaactatttcaccacaactcaaattagttatattgggtatacaagtgtaaactaagaaatataactatgtaggtgcaaatatttttgaaaaaccccaaataataagccaaaataaagaaagaatactaaatcgtacactcattactacaacaactaaaaaatatttataatcattgaactcctatgcacattctactgcaaaacataagtagaagaagttcaaattttggccatgaaatgacaccattttcttacactcaaaatgatcttaaatttgatccccggg

SEQ ID NO: 269 - protein, 1282 aa, Solanum tuberosum; identical to SEQ ID NO: 94

SEQ ID NO: 270 - DNA, 876 bp, Artificial Sequence
  2xS4xD-NpCABE-Avr3a-terminator
cagccaccaaagaggacccagaattctagtcagccaccaaagaggacccagaattctagttacaattcaaacattgttcaaacaaggaacctctagttacaattcaaacattgttcaaacaaggaacctctagttacaattcaaacattgttcaaacaaggaacctctagttacaattcaaacattgttcaaacaaggaacctctagtgccggcctgcagtaaagccatttatatacacttagtgcaaagcccatgaaactcaagcctcaactcgagatggaccaaaccaaggtcctggtgtatgggacgccagctcactacatacacgattcagccggcagaagacttcttcgcaagaacgaagagaatgaagaaacgtctgaggagcgagccccaaatttcaatttggcgaatctaaatgaggagatgtttaatgtggctgcgttgacgaagagagcagatgccaaaaagctagcgaaacagcttatgggtaatgataagctggcggatgctgcatacatttggtggcagcacaacagggttacgctagaccagattgacacgttcctgaagcttgcaagccgcaagacgcaaggcgcaaagtacaatcagatctacaatagctacatgatgcacctggggctcactggatattaaatcactagagtccgcaaaaatcaccagtctctctctacaaatctatctctctctatttttctccagaataatgtgtgagtagttcccagataagggaattagggttcttatagggtttcgctcatgtgttgagcatataagaaacccttagtatgtatttgtatttgtaaaatacttctatcaataaaatttctaattcctaaaaccaaaatccagtg

SEQ ID NO: 271 - protein, 1282 aa, Artificial Sequence
  R3a - K35E + K37M
MEIGLAVGGAFLSSALNVLFDRLAPHGDLLNMFQEHMDHVKLLKKLEDILLGLQIVLSDAENKQASNRHVSQWFNKLQNAVDGAENLIEQVNYEALRLKVEGQHQNLAETSNQQVSDLNLCFSDDFFLNIKDKLEETIETLEVLEKQIGRLGLKEHFGSTKQETRTPSTSLVDDSDIFGRQNDIEDLIDRLLSEDASGKKRTVVPIVGMGGLGKTTLAKAVYNDERVQIHFGLKAWFCVSEAFDAFRITKGLLQEIGSFDLKADDNLNQLQVKLKERLKGKKFLIVLDDVWNDNYNKWDELRNVFVQGDIGSKIIVTTRKESVALMMGNEQISMDNLSTESSWSLFKTHAFENMGPMGHPELEEVGKQIAAKCKGLPLALKTLAGMLRSKSEVEEWKRILRSEIWELPHNDILPALMLSYNDLPAHLKRCFSFCAIFPKDYPFRKEQVIHLWIANGLVPQEDVIIEDSGNQYFLELRSRSLFERVPNPSQGNTENLFLMHDLVNDLAQIASSKLCIRLEESQGSHMLEQSQHLSYSMGYGGEFEKLTPLYKLEQLRTLLPTCIDLPDCCHHLSKRVLHNILPRLTSLRALSLSCYEIVELPNDLFIKLKLLRFLDISRTEIKRLPDSICALYNLETLLLSSCYDLEELPLQMEKLINLRHLDISNTRLLKMPLHLSKLKSLQVLVGAKFLIGGLRMEDLGEVHNLYGSLSVVELQNVVDRREAVKAKMREKNHVDRLYLEWSGSSSADNSQTERDILDELRPHKNIKVVKITGYRGTNFPNWLADPLFLKLVKLSLRNCKNCYSLPALGQLPFLKFLSIREMHGITEVTEEFYGSWSSKKPFNCLEKLEFKDMPEWKQWDLLGSGEFPILEKLLIENCPELSLETVPIQLSSLKSFDVIGSPLVINFPLSILPTTLKRIKISDCQKLKLEQPTGEISMFLEELTLIKCDCIDDISPELLPRARKLWVQDWHNLTRFLIPTATETLDIWNCENVEILSVACGGTQMTSLTIAYCKKLKWLPERMQELLPSLKELHLSNCPEIESFPEGGLPFNLQQLAIRYCKKLVNGRKEWHLQRRLCLTALIIYHDGSDEEIVGGENWELPSSIQRLTIVNLKTLSSQHLKNLTSLQYLFIRGNLPQIQPMLEQGQCSHLTSLQSLQISSLQSLPESALPSSLSHLEISHCPNLQSLPESALPSSLSQLTINNCPNLQSLSESTLPSSLSQLEISFCPNLQYLPLKGMPSSLSELSIYKCPLLKPQLEFDKGEYWPNIAQFPTIKIDRECM

SEQ ID NO: 272 - protein, 14 aa, Artificial Sequence
  Motif of LRR domain
  VARIANT 1..14: X = A or R or N or D or C or Q or E or G or H or I or L or K or M or F or P or S or T or W or Y or V
LXXLXXLXLXXCXX

SEQ ID NO: 273 - protein, 169 aa, Artificial Sequence
  Consensus motif
  VARIANT 1..169: X = A or R or N or D or C or Q or E or G or H or I or L or K or M or F or P or S or T or W or Y or V
MLIIGEXFLSAFLQVLFEKLASXGIXLFMXXXKGXIXXKLIKKWEKXLRIIEAVLSDAEQKQXXNNAVKXWLNDLQDXAYDLEDILDXFXTDAXIXELXXXNDQHQXXXXDXNXKXXXXXXXXXQSXAXXXLXFLXXXXXXFSXKIEEISXXLEDLLXQIXXLALSSXI

SEQ ID NO: 274 - DNA, 3463 bp, Beta vulgaris
gattcatactctacttccatactttgtaaaaacaaaaaaagataaaaatggtgataggcggagagatttttctatcagcgtttcttcaagtgctctttgaaaagcttgcatcaggagggataagtctattcctaaaaagagaaaaaggaataggacctaaagttattcaaagatggaacaaaaaattgagattaatagaggcggttttaagtgacgccgagcaaaagcagtttcacaacaatgccgtcaaattgtggcttcgagatcttcaagagttcgcgtacgatttagaggacatcttagacgaatttgatacagatgctcgacttaaggagttcaatgatcagcctcagccacagccacaggaacatcaacccaaatcttcttgttctcctttcaataaggtacaaagctgtctttcttgtggtttcccaactttaaataagaaaactacaaagtattcaactagcattgaagagatgagcactcgcttggaagatcttctggaccaagtaaggtctttggctctctcaacgcagatacactcaagggtagagcaacatgaagaacggagggaaacatcatctatgatacgggagccagttgtatatgggagggacgatgagaaaaatcagataatccaaagattattaaagacagatgagccattttgtgaaaattacaatgtaattcctattgttggaacaggaggcattgggaagacgaccctcgctcaggctgtatacaatgatgagcaggtgaaggctcactttgatgtaaaagcatgggtgtgcatctccgatgagtttgatgtcaaacaagtgacaacaagcattatcacttcagccactcgtgatacatgtaatttcggtgttctagatgaggcacaagataaattaaagaacttgcttgtagacaaaagattcttgatcgttcttgatgatatatggagtgatgaatatgatccttgggaccaacttcaaacccctttttcatcagcgaagaagggaagtagagttctaatcacgaccagaatggagacggtggcaaagaacatggttaaaagaccagatcaaagccccatcatcaagttaaaggttttatctgatgatgattgttggcttctctttcaaaagcatgcagtcgtagatgaagacctcattgtgatgcagaaggacttggttgggttgttcaaaggattgcctttggctgcaaaagctctaggaggtctcctaaggagagagcgtaagagtaattgggcaaggatattaaagagcaatatttggagtgaagaaggtggtgttctgccagtcttgaggcttagttatcatcatctcccacaaaacctcaaacgtgcctttgcttattgttctatattcccgaaagattataaattcacggagatgaatgttatattaatgtggatagcagaaggcttgctgccagagcacgacaaggagtgcaaggaagacattggtcgtgactattttcttgatctagtatcaagatcattgtttgaaccaaacagtccaatgtatatggatggatctttcattatgcatgacctaatccatgacctagctcaatgggctgctggtgaagtttgttgcacattgaatatccaaaaactttcttctagaacacgttattggtctttctctgaagaaatactgatagatcaaacatggacttcaaagaaacttgtccaggtacgatcatttgcttcttttggtgcattagatgttcgaattcctatgcaactactagattccattttccgtcagtttcaatacttacgcttgttgcgtatgcataaggcgggaataattgagttaccaaatagtatgggtaatctgaaacacttgagacttcttgacctctcatggaatacaaaactaactagattgccaaagtccactagcaagctttgcaacctccagacgctgctgttaagaggatgtaagtctcttgtggagatagtccctctaatcgaacttcaacaccttgatgttagtagtaggtatgctgcttcaccgttggggattggaaaattaacaaacttgcagacattgaagggatttactttgagaagatactctaagacaagtataagtgaattgaagaacttgaaatgcctccgtggctcactggacatccatggcctagagaatgtgtttagtagtgaagaagcacaagcagcaaggttgcacgaaaagacaggccttgataagttggaaatgtattggggagataatgcccatgatgttgatgacaacattaaaaaagatgtagttgatcgattacagcctccggaatccatcaaagaattaacgttgaatgggtacgacggcttaacattccctgcttggttgggaaatccctcttacactaatatggttttcatagaattaagggagtgtaggagatgtgaattcttaccagcactagggcagctgccctcattaaagaacatcataatagaagggatggatgatattaagactgtaggccctgaattttacggcaatgatgatggttgttcaaacctgtttcctgcattgaaaagtctacgattctatggaatggggggttgggaggagtggttggccccatcagttgacaatagcaatgcatttccctgccttgaatatattagcatatatgaatgtccattgttgcgggctaacttaccttcccatctcccatccctaaaagacttgtccattggcaaatgcaaagagttgagattgtcacttccaagctgccctttgctccaaaaattgactattataacatatgagacgccatttagtattgctgattgtttgccctcaactcttgagaccctggaaatcttgcactccgaaatagagcagccaattcaagagtggaaacttgacctccttacttctcttaaatctcttgatctccaaaacataggcagagccgcagatacaatagagcatattccccaaccagattttcatcttccctcttccttgtcttccttatatatctcggatttcaagaatttgaaatccttgtcatgctctacccttcccaacctcactgaaattaaaatctggaattgtaagaagctggaatcattgggtgtcgatttcccaccatcgaagcttcaggaagcgtattttagtgattgccctttgatttatcaacgatgcaaaccggatccccatggacttattgtttttaattatattgataaatacaaatattcgtacatttgaagattccagttttcattccctgaagattgagttggaggtggagttttggggtttttttcagattttgtttttgttttttttcattttctttagtttatttgtatgaaactagaatatattcaaggaattgtgataaaaaaaaaaaaaaaagggcggccgctctagagtatccctcgaggggcccaagcttacgcgacccagctttcttacaaagg

SEQ ID NO: 275 - protein, 1066 aa, Beta vulgaris
MVIGGEIFLSAFLQVLFEKLASGGISLFLKREKGIGPKVIQRWNKKLRLIEAVLSDAEQKQFHNNAVKLWLRDLQEFAYDLEDILDEFDTDARLKEFNDQPQPQPQEHQPKSSCSPFNKVQSCLSCGFPTLNKKTTKYSTSIEEMSTRLEDLLDQVRSLALSTQIHSRVEQHEERRETSSMIREPVVYGRDDEKNQIIQRLLKTDEPFCENYNVIPIVGTGGIGKTTLAQAVYNDEQVKAHFDVKAWVCISDEFDVKQVTTSIITSATRDTCNFGVLDEAQDKLKNLLVDKRFLIVLDDIWSDEYDPWDQLQTPFSSAKKGSRVLITTRMETVAKNMVKRPDQSPIIKLKVLSDDDCWLLFQKHAVVDEDLIVMQKDLVGLFKGLPLAAKALGGLLRRERKSNWARILKSNIWSEEGGVLPVLRLSYHHLPQNLKRAFAYCSIFPKDYKFTEMNVILMWIAEGLLPEHDKECKEDIGRDYFLDLVSRSLFEPNSPMYMDGSFIMHDLIHDLAQWAAGEVCCTLNIQKLSSRTRYWSFSEEILIDQTWTSKKLVQVRSFASFGALDVRIPMQLLDSIFRQFQYLRLLRMHKAGIIELPNSMGNLKHLRLLDLSWNTKLTRLPKSTSKLCNLQTLLLRGCKSLVEIVPLIELQHLDVSSRYAASPLGIGKLTNLQTLKGFTLRRYSKTSISELKNLKCLRGSLDIHGLENVFSSEEAQAARLHEKTGLDKLEMYWGDNAHDVDDNIKKDVVDRLQPPESIKELTLNGYDGLTFPAWLGNPSYTNMVFIELRECRRCEFLPALGQLPSLKNIIIEGMDDIKTVGPEFYGNDDGCSNLFPALKSLRFYGMGGWEEWLAPSVDNSNAFPCLEYISIYECPLLRANLPSHLPSLKDLSIGKCKELRLSLPSCPLLQKLTIITYETPFSIADCLPSTLETLEILHSEIEQPIQEWKLDLLTSLKSLDLQNIGRAADTIEHIPQPDFHLPSSLSSLYISDFKNLKSLSCSTLPNLTEIKIWNCKKLESLGVDFPPSKLQEAYFSDCPLIYQRCKPDPHGLIVFNYIDKYKYSYI

SEQ ID NO: 276 - DNA, 3241 bp, Beta vulgaris
attgaattaatctactacaattgaaaataaaagtgagtcaatattcagtaatatgggaataataggagaaacaattctatcagcatttctacaagtgctgtttgagaagttattttcccgaggagtaaatttgtttatggggttagtgaaaggaggaatccaacaaaaaaccatcaaacaatgggagaaacaactaagaattatagaggcagttttaagtgatgctgagcaaaagcaagtccaaagcaatgctgtgaagtcatggatgcaggacctccaagatttggcgtatgacttagaagatgtgttggatgcatttgcaactcaagctcaaatttacgaattgtcgatcatgaatgatagtcatagctccgaattgaaagataatgacaccaagtttatggcggaaagcattattgttggcggttcaaaagctatagagcatttatcttttatgtttaactctggccaagatttttcggggaggatagaagagattagtcaacaattggaagaaattttaagccaaaccgagggtttagggctatcagttcatgtgatgcatcagcaagtagtacccacaacaacagcacaacgttggcaaagctggcgagaatcaacttctttattatgtgagccatttgtatatggacgggaaggtgacaagaaggagatcatgcatcggttactacatgacaagaactcaagctctgggaactatattgtgattcctattgttggaaaaggaggcattggtaagacgactcttgctcaacttatctacaatgatgaagaagtggacgtgttttctttgaaagcatgggtttatgtatctcaagtgtttgatgctaaaagggtaacaacatcaattctgaattcaatcactggtgaagccaattcattttgtgatttaaatcaagctcaagtacgattgcagcaagtgcttagaaacaaacgattcttgattatacttgatgacatgtggagtgtgatgtacagtgattgggatgacctacgcactccactaagagcaggggcaaaaggaagcagggtcatagttaccaccagaattcagaaagttgcgagaattatgaatccacaaatgaataatatgattttattggagtgtcttgcagatgatgactgttggcatctaattttgcaacatgcctttgatgatgccaatattgccgtaagcccaaatattagtctaatgagagctgaaatggtaagggcgtgcaaagggatacccctggtagcaaaaactcttggaggccttttaaggaccaaagtggaggaggagagcgagtggcaagagagtctcaacactgatattttgagcatgagtaagagtagagttttacaggtattggaattgagttattatgaccttccatcacatttgaaacgctgtttctcttactgcgctatatttcccaatgatcatgcttttacagaggaggatgtcattttgttatggatggctgaaggcttcctacctgaaaatgtagggaacaagcgaattgaagacataggccatgagtatttccaggagctagtatcaagatcattttttgaacccagcacaaaaggatcaaaatggttcaaaatgcacaacttatatagtgatttggcccgacaagttgttggtgatttatggttggtgatgaaggaatgttcagtaaggaaagattatagagctcgacatttatctttctccaaactagatgaatgtgaagatctatttcacctcaagaacataagccactttcgtacttttgctcaatttgacaagcatcccagttcctcaagccgagtacttgagcttataggatattttcagtacttaagggtgctattgctaccgagcctgggaattacaaattttccagaatctataggtgacctcaagctcttacgatatctcaatctctcatacaatgattttgaagaattgccgaattcagtaagcaaccttgttaatctccaaactttgttgctgaagggttgcgttaaacttcagaaattatcgacgaatatgaggtgtctaatcaaccttcgccatcttgatattgatggtacctctctgaatgagatgccattggggttagggaatctgacgaacctgcaaacgttacacagatttgtcttaggagctaatgcacccataataaaagagttgaagaacttgaagcagcttcgaggaaagttaaccatagctggcttagagaatttggtgagctccaacgatgcaggagaagcaaggttgaatgagaaatcgtgtcttcatgagttggaaatggtatgggaatggggaaccttcactaatgggattgatgacaacactaagatagatgtgttagatcagctacaccctcacagatccacaaaagtgttaactctaagaaactacaagggtttgacattcccaagttggttgagtgacccttctttcactaagatggttgtcataaggctaataggttgtgagagatgtgaatcattaccatcactagggaagcttccttcattgaaggaacttgtggttcaagaaatgcgcggtcttaaatcagtagatgatgacttttacggtgttggttgttcaaacccttttccggcattgataactctgaaattcaagtctatgttttcttgggaaagttggttaatttcatcagctgatactaaggttttttctaaccttcaagagctttcaatcaaggattctcccctcttacaacatttatctttaccttcatgtctccctttgttagagacacttgagatacaacattgtaagaagctagatgcctcacttccaaccctccctcatctccagaagttggtattagaagattgctcatcccttttcatggttgatcagctatctacgactcttcgacaactggctatttccaattgccggaaactacagttggtggaattcagaagaccatgcttctctcttgatgaaaatatttctctagaggttgtagaagttgtcaattgccaatctctgttaaattttttcagtagagatggtattgaagtgctacatcacgtgccaggccacctatcaggtttacatacaccaggaggtctagggggaagaatactgaaatgtagagtgagctggcaagaatgagctggcaggtggttagtgcggaaattcagggagttggttagagaaatatctgttagagaaatatctgtccagagggaatgtagctgacattctaga

SEQ ID NO: 277 - protein, 1030 aa, Beta vulgaris
MGIIGETILSAFLQVLFEKLFSRGVNLFMGLVKGGIQQKTIKQWEKQLRIIEAVLSDAEQKQVQSNAVKSWMQDLQDLAYDLEDVLDAFATQAQIYELSIMNDSHSSELKDNDTKFMAESIIVGGSKAIEHLSFMFNSGQDFSGRIEEISQQLEEILSQTEGLGLSVHVMHQQVVPTTTAQRWQSWRESTSLLCEPFVYGREGDKKEIMHRLLHDKNSSSGNYIVIPIVGKGGIGKTTLAQLIYNDEEVDVFSLKAWVYVSQVFDAKRVTTSILNSITGEANSFCDLNQAQVRLQQVLRNKRFLIILDDMWSVMYSDWDDLRTPLRAGAKGSRVIVTTRIQKVARIMNPQMNNMILLECLADDDCWHLILQHAFDDANIAVSPNISLMRAEMVRACKGIPLVAKTLGGLLRTKVEEESEWQESLNTDILSMSKSRVLQVLELSYYDLPSHLKRCFSYCAIFPNDHAFTEEDVILLWMAEGFLPENVGNKRIEDIGHEYFQELVSRSFFEPSTKGSKWFKMHNLYSDLARQVVGDLWLVMKECSVRKDYRARHLSFSKLDECEDLFHLKNISHFRTFAQFDKHPSSSSRVLELIGYFQYLRVLLLPSLGITNFPESIGDLKLLRYLNLSYNDFEELPNSVSNLVNLQTLLLKGCVKLQKLSTNMRCLINLRHLDIDGTSLNEMPLGLGNLTNLQTLHRFVLGANAPIIKELKNLKQLRGKLTIAGLENLVSSNDAGEARLNEKSCLHELEMVWEWGTFTNGIDDNTKIDVLDQLHPHRSTKVLTLRNYKGLTFPSWLSDPSFTKMVVIRLIGCERCESLPSLGKLPSLKELVVQEMRGLKSVDDDFYGVGCSNPFPALITLKFKSMFSWESWLISSADTKVFSNLQELSIKDSPLLQHLSLPSCLPLLETLEIQHCKKLDASLPTLPHLQKLVLEDCSSLFMVDQLSTTLRQLAISNCRKLQLVEFRRPCFSLDENISLEVVEVVNCQSLLNFFSRDGIEVLHHVPGHLSGLHTPGGLGGRILKCRVSWQE

SEQ ID NO: 278 - DNA, 29 bp, Phytophthora infestans
aatcagatctacaatagctacatgatgca

SEQ ID NO: 279 - DNA, 24 bp, Phytophthora infestans
ccttatctgggaactactcacaca

SEQ ID NO: 280 - DNA, 20 bp, Solanum tuberosum
taagaaaggcaaggctgcat

SEQ ID NO: 281 - DNA, 20 bp, Solanum tuberosum
tcccttgggcaagttaacag

SEQ ID NO: 282 - protein, 6 aa, Artificial Sequence
  Consensus sequence
VLSDAE

SEQ ID NO: 283 - protein, 9 aa, Artificial Sequence
  Consensus sequence
  VARIANT 7: A or R or N or D or C or E or Q or G or H or I or L or K or M or F or P or S or T or W or Y or V
VLSDAEXKQ

1. A nucleic acid molecule for increasing the resistance of a plant or a part thereof towards at least one plant pathogen, wherein the nucleic acid molecule comprises a nucleotide sequence selected from the group consisting of:
(a) a nucleotide sequence encoding
i) a plant resistance protein of the resistance protein class CC-NBS-LRR and
ii) an avirulence protein;
(b) a nucleotide sequence encoding a plant resistance protein of the resistance protein class CC-NBS-LRR;
(c) a nucleotide sequence encoding an avirulence protein; and
(d) a nucleotide sequence hybridizing under stringent conditions to a sequence which is complementary to a nucleotide sequence according to (a), (b) or (c);
wherein the encoded resistance protein, the encoded avirulence protein, or both, include at least one amino acid substitution wherein the substitution leads to a decrease of cell death during a hypersensitive reaction in comparison to a resistance protein, avirulence protein or both lacking the amino acid substitution.

2. A vector or an expression cassette comprising the nucleic acid molecule according to claim 1.

3. The nucleic acid molecule according to claim 1, wherein a nucleotide sequence encodes
i) a plant resistance protein of the resistance protein class CC-NBS-LRR and
ii) an avirulence protein.

4. The nucleic acid molecule according to claim 1, wherein the nucleic acid molecule encodes a plant resistance protein having at least one amino acid substitution within the CC-domain leading to a decrease of cell death during a hypersensitive reaction in comparison to a resistance protein which lacks the amino acid substitution within the CC-domain.

5. The nucleic acid molecule according to claim 1, wherein the at least one amino acid substitution is a substitution in a plant resistance protein and wherein the substitution is the exchange of
I) a basic, positively charged amino acid against an acidic, negatively charged or an aliphatic amino acid or
II) D or E in a DAE motif against a basic, positively charged amino acid or an aliphatic amino acid.

6. A polypeptide encoded by the nucleic acid molecule according to claim 1.

7. A cell comprising the nucleic acid molecule according to claim 1.

8. A plant or part thereof comprising the cell according to claim 7, or a plant or part thereof regenerated from the cell according to claim 7.

9. A seed or offspring from a plant or part thereof comprising a cell comprising the nucleic acid molecule according to claim 1, or a plant or part thereof regenerated from the cell comprising the nucleic acid molecule according to claim 1.

10. A method for increasing a plant's resistance towards at least one plant pathogen, the method comprising integrating the nucleic acid molecule according to claim 1 into the genome of at least one plant cell and regenerating a plant from that cell.

11. The plant or part thereof according to claim 8 wherein the plant or part thereof belongs to a species which is selected from the group consisting of: Beta vulgaris, Solanum tuberosum, Triticum aestivum, Hordeum vulgare, Secale cereal, Zea mays, Beta vulgaris, Helianthus annuus, Sorghum bicolor, Brassica napus.

12. A method for increasing the yield produced by a plant being cultivated in an area comprising an organism which is pathogenic towards the plant:
a) providing a plant,
b) cultivating the plant in an area comprising an organism which is pathogen towards the plant, and
c) harvesting the plant,
wherein the plant comprises a nucleic acid molecule according to claim 1 for increasing the resistance towards the organism which is pathogenic towards the plant.

13. The method according to claim 12 wherein the organism which is pathogenic towards the plant is selected from the group consisting of: Alternaria solani, Phytophthora infestans, Blumeria graminis, fungi belonging to the genus of Fusarium, Cercospora beticola and Helminthosporium turcicum.

14. The vector or expression cassette according to claim 2, wherein the nucleic acid molecule is operatively linked to a pathogen-inducible promoter.

15. A cell comprising the polypeptide according to claim 6.

16. A cell comprising the vector or expression cassette according to claim 2.

17. A seed or offspring from a plant or part thereof comprising a cell comprising the nucleic acid molecule according to claim 1, wherein the seed or the offspring comprises a polypeptide encoded by the nucleic acid molecule according to claim 1.

18. A seed or offspring from a plant or part thereof comprising a cell comprising the nucleic acid molecule according to claim 1, wherein the seed or the offspring comprises a vector or expression cassette comprising the nucleic acid molecule according to claim 1.

19. A method for increasing a plant's resistance towards at least one plant pathogen, the method comprising transforming a plant cell with a nucleic acid molecule according to claim 1, or a vector or an expression cassette comprising the nucleic acid molecule according to claim 1, and regenerating a plant from that cell.
